(19) United States
(12) Patent Application Publication
(10) Pub. No.: US 2011/0119792 A1
(43) Pub. Date: May 19, 2011

(54) Genes Controlling Plant Root Growth And Development For Stress Tolerance And Method Of Their Use

(76) Inventors: Henry T. Nguyen, Columbia, MO (US); Babu Valliyodan, Columbia, MO (US)

(21) Appl. No.: 12/966,981

(22) Filed: Dec. 13, 2010

Related U.S. Application Data
(63) Continuation-in-part of application No. 12/138,392, filed on Jun. 12, 2008.
(60) Provisional application No. 61/284,111, filed on Dec. 12, 2009.
(60) Provisional application No. 60/934,321, filed on Jun. 12, 2007.

(51) Int. Cl. C12N 15/82; A01H 5/00

(52) U.S. Cl. 800/290; 800/298; 800/312; 800/320.1; 800/320.2; 800/320.3; 800/314

(57) ABSTRACT

Microarrays are employed to analyze soybean transcriptome under water stress conditions in different regions of the root at vegetative stage. Drought responsive genes and transcription factors are identified which may be used for enhancing drought tolerance in soybean or other plants through genetic/metabolic engineering. This disclosure pertains to nucleic acid molecules isolated from soybean and maize that encode polypeptides that may be important for drought tolerance. The disclosure also relates to methods of using these genes from soybean in transgenic plants to confer the desired agronomic traits, and to use such genes or regulatory elements thereof to assist germplasm enhancement by molecular breeding or to identify other factors or chemicals that may enhance a plant's capability to grow under drought conditions.

### RELATED APPLICATIONS

[0001] This application claims priority to U.S. Provisional Application No. 61/284,111 filed on Dec. 12, 2009. This application is also a continuation-in-part of U.S. patent application Ser. No. 12/138,392 filed on Jun. 12, 2008, which claims priority of U.S. Provisional Application No. 60/934,321 filed on Jun. 12, 2007. The contents of all applications mentioned above are hereby incorporated into this application by reference.

### BACKGROUND

[0002] 1. Field of the Invention

[0003] The present invention relates to methods and materials for identifying genes and the regulatory network in a plant that control the plant's response to various environmental conditions and/or stress. More particularly, the present invention relates to genes in the root of a plant that help confer drought resistance to the plant.

[0004] 2. Description of the Related Art

[0005] Drought is one of the major abiotic stress factors limiting crop productivity worldwide. Global climate changes may further exacerbate the drought situation in major crop-producing countries. Although irrigation may in theory solve the drought problem, it is usually not a viable option because of the cost associated with building and maintaining an effective irrigation system, as well as other non-economical issues, such as the general availability of water (Boyer, 1983). Thus, alternative means for alleviating plant water stress are needed.

[0006] In soybean, drought stress during flowering and early pod development significantly increases the rate of flower and pod abortion, thus decreasing final yield (Boyer 1983; Westgate and Peterson 1993). Soybean yield reduction of 40% because of drought is common experience among soybean producers in the United States (Muchow & Sinclair, 1986; Specht et al. 1999).

[0007] Mechanisms for selecting drought tolerant plants fall into three general categories. The first is called drought escape, in which selection is aimed at those developmental and maturation traits that match seasonal water availability with crop needs. The second is dehydration avoidance, in which selection is focused on traits that: lessen evaporatory water loss from plant surfaces or maintain water uptake during drought via a deeper and more extensive root system. The last mechanism is dehydration tolerance, in which selection is directed at maintaining cell turgor or enhancing cellular constituents that protect cytoplasmic proteins and membranes from drying.

[0008] The molecular mechanisms of abiotic stress responses and the genetic regulatory networks of drought stress tolerance have been reviewed recently (Neumann 2008; Wang et at 2003; Vinocur and Altman 2005; Chaves and Oliveira 2004; Shinozaki et al. 2003). Plant modification for enhanced drought tolerance is mostly based on the manipulation of either transcription and/or signaling factors or genes that directly protect plant cells against water deficit. Despite much progress in the field, understanding the basic biochemical and molecular mechanisms for drought stress perception, transduction, response and tolerance remains a major challenge in the filed. Utilization of the knowledge on drought tolerance to generate plants that can tolerate extreme water deficit condition is a even bigger challenge.

[0009] Analysis of changes in gene expression within a target plant is important for revealing the transcriptional regulatory networks. Elucidation of these complex regulatory networks may contribute to our understanding of the responses mounted by a plant to various stresses and developmental changes, which may ultimately lead to crop improvement. DNA microarray assays (Schena et al. 1995; Shalon et al. 1996) have provided an unprecedented opportunity for the generation of gene expression data on a whole-genome scale.

[0010] Gene expression profiling using cDNAs or oligonucleotides microarray technology has advanced our understanding of gene regulatory network when a plant is subject to various stresses (Bray 2004; Denby and Gehring 2005). For example, numerous genes that respond to dehydration stress have been identified in Arabidopsis and have been categorized as “rd” (responsive to dehydration) or “erd” (early response to dehydration) (Shinozaki and Yamaguchi-Shinozaki 1999).

[0011] There are at least four independent regulatory pathways for gene expression in response to water stress. Out of the four pathways, two are abscisic acid (ABA) dependent and the other two are ABA independent (Shinozaki and Yamaguchi-Shinozaki 2000). In the ABA independent regulatory pathways, a cis-acting element is involved and the Dehydration-responsive element/C-repeat (DRE/CRT) has been identified. DRE/CRT also functions in cold response and high-salt-responsive gene expression. When the DRE/CRT binding protein DREB1/ICBF is overexpressed in a transgenic Arabidopsis plant, changes in expression of more than 40 stress-inducible genes can be observed, which lead to enhanced tolerance to freeze, high salt, and drought (Seki et al, 2001; Fowler and Thomashow 2002; Murayama et al. 2004).

[0012] In summary, the production of microarrays and the global transcript profiling of plants have revolutionized the study of gene expression which provides a unique snapshot of how these plants are responding to a particular stress. However, no transcriptional profiling or transcriptome changes have been reported for soybean plants under water stress conditions. A well designed analysis of gene expression in soybean grown under drought may help illuminate the regulatory networks in soybean under these adverse conditions, which may further lead to development of new soybean plant that can better tolerate drought conditions than conventional strains.

### SUMMARY

[0013] The instrumentalities described herein overcome the problems outlined above and advance the art by providing genes and DNA regulatory elements in plant roots which may play an important part in response to drought conditions. These genes are collectively called Root Specific Drought Response Genes (RSDRGs) in this disclosure. Methodology is also provided whereby these drought responsive genes may be introduced into a plant to enhance its capability to grow and reproduce under water deficit conditions. The RSDRGs or fragments thereof may be introduced and expressed in the roots of a host plant, or alternatively, they may be expressed in other organs of the host plants. Regulatory elements, such as promoters and enhancers of the RSDRGs, may also be employed to control expression of genes that are not yet identified but may prove beneficial for enhancing a plant's capability to grow under drought conditions.

[0014] In crop plants, root growth is often less sensitive to low tissue water potential than shoot growth. This root specific trait confers drought tolerance to some plants to certain degree, but the mechanisms underlying root growth and development under drought stress conditions (low water potential) are not well understood. To discover genes and to identify mechanisms that determine these responses to low water potential conditions, gene expression patterns were profiled from three regions of water-stressed and well-watered roots, respectively. These analyses, along with comparisons with the gene expression patterns in maize root regions under low water potentials with those of soybean, support the notion that there is a distinct and species-specific pattern of gene expression under water deficit conditions in root tissues.

[0015] This disclosure provides novel drought responsive genes that may play a role in root growth and development under normal conditions. These candidates may be used for enhanced drought tolerance in soybean and other crops through genetic/metabolic engineering. The genes and methods disclosed herein apply not only to soybean and maize but also to drought stress tolerance/avoidance mechanisms in other plants. This disclosure provides both early and late stage stress responsive genes/proteins controlling root growth and development under water deficits. One or more of these genes or their fragments from soybean or maize as disclosed herein may be expressed in transgenic plants to confer certain agronomic traits to a host plant. The genes may also be used to assist germplasm enhancement by molecular breeding.

[0016] More particularly, microarray experiments are conducted to analyze the gene expression pattern in different root regions of soybean plants in response to drought stress. Tissue specific transcriptomes may be compared to help elucidate the transcriptional regulatory network and facilitate the identification of stress specific genes and promoters. For purpose of this disclosure, genes whose expression are either up- or down-regulated in response to drought condition are referred to as Drought Response Genes (or DRGs). Some DRGs may show tissue specific expression patterns in response to drought condition. Those DRGs whose expression are up- or down-regulated in the roots are also referred to as Root Specific Drought Response Genes (“RSDRGs”). For purpose of this disclosure, a “RSDRG protein” refers to a protein encoded by a RSDRG.

[0017] The microarray experiments described in this disclosure may not have uncovered all the RSDRGs in all plants, or even in soybean alone, due to the variations in experimental conditions, and more importantly, due to the different gene expressions among different plant species. It is also to be understood that certain RSDRGs disclosed here may have been identified and studied previously; however, regulation of their expression under drought condition or their role in drought response may not have been appreciated in previous studies. Alternatively, some RSDRGs may contain novel coding sequences. Thus, it is an object of the present disclosure to identify known or unknown genes whose expression levels are altered in response to drought condition.

[0018] For purpose of this disclosure, if a transgenic plant or a genetically altered plant is able to grow at a similar rate and reproduce at a similar yield when water is limited as compared to the host plant or the parental plant with sufficient water supply, it can be said that the transgenic plant or the genetically altered plant has gained drought resistance (or tolerance), or in other words, that such plant is more drought resistant, or more tolerant to drought (or water deficit) conditions than the host or the parent. In one aspect, the transgenic or altered plant may be able to grow at a similar rate and reproduce at a similar yield when water available to the plant is 20% less, 30% less, 40% less, 50% less, more preferably 60% less, than the water available to the host or parental plant. In order to generate a transgenic plant that is more tolerant to drought condition when compared to a host plant, the expression levels of a protein encoded by an endogenous Root Specific Drought Response Gene (RSDRG) or a fragment thereof may be altered to confer a drought resistant phenotype to the host plant.

[0019] For example, the transcription, translation or protein stability of the protein encoded by the RSDRG may be modified so that the levels of this protein are rendered significantly higher than the levels of this protein would otherwise be even under the same drought condition. To this end, either the coding or non-coding regions, or both, of the endogenous RSDRG may be modified.

[0020] In another aspect, in order to generate a transgenic plant that is more tolerant to drought condition when compared to a host plant, the method may comprise the steps of: (a) introducing into a plant cell a construct comprising a Root Specific Drought Response Gene (RSDRG) or a fragment thereof encoding a polypeptide; and (b) generating a transgenic plant expressing said polypeptide or a fragment thereof. In one embodiment, the Drought Response Gene or a fragment thereof is derived from a plant that is genetically different from the host plant. In another embodiment, the Drought Response Gene or a fragment thereof is derived from a plant that belongs to the same species as the host plant. For instance, an RSDRG identified in soybean may be introduced into soybean as a transgene to confer upon the host increased capability to grow and/or reproduced under mild to severe drought conditions.

[0021] The RSDRGs disclosed here include known genes as well as genes whose functions are not yet fully understood. Nevertheless, both known or unknown RSDRGs may be placed under control of a promoter and be transformed into a host plant in accordance with standard plant transformation protocols. The transgenic plants thus obtained may be tested for the expression of the RSDRGs and their capability to grow and/or reproduce under drought conditions as compared to the original host (or parental) plant.

[0022] Although the RSDRGs disclosed herein are identified in soybean, they may be introduced into other plants as transgenes. Examples of such other plants may include but are not limited to corn, wheat, rice, and cotton. In another aspect, homologs in other plant species may be identified by PCR, hybridization or by genome search which may share substantial sequence similarity with the RSDRGs disclosed herein. In a preferred embodiment, such a homolog shares at least 90%, more preferably 98%, or even more preferably 99% sequence identity with a protein encoded by a soybean RSDRG.

[0023] It is further an object to identify the non-coding regulatory sequences of the RSDRGs which are calleed Root Specific Drought Response Regulatory Elements (RSDRREs) for purpose of this disclosure. These RSDRREs may be used to prepare DNA constructs for the expression of genes of interest in a host plant. The RSDRREs or the RSDRGs may also be used to screen for factors or chemicals that may affect the expression of certain RSDRGs by interacting with a RSDRRE. Such factors or chemicals may be used to induce drought responses by activating expression of certain genes in a plant.

[0024] In one aspect, the genes of interest may be genes from the transgenic host plant, or they may be from other plants or even from non-plant organisms. The genes of interest may be those identified and listed in this disclosure, or they may be the homologs of these genes.

[0025] In one embodiment, the genes of interest (RSDRGs) may be placed under control of the RSDRREs such that their expression may be upregulated under drought condition. This arrangement is particularly useful for those genes of interest that may not be desirable under normal condition, because such genes may be placed under a tightly regulated RSDRRE which only drives the expression of the genes of interest when water deficit condition is sensed by the plant. Under control of such a RSDRRE, expression of the gene of interest may be only detected under drought condition. The RSDRRE can thus be used to regulate a heterologous gene such that expression of the heterologous gene is induced under drought conditions.

[0026] It is an object of this disclosure to provide a system and a method for the genetic modification of a plant, to increase the resistance of the plant to adverse conditions such as drought and/or excessive temperatures, compared to an unmodified plant.

[0027] It is another object of the present invention to provide a transgenic plant that exhibits increased resistance to adverse conditions such as drought and/or excessive temperatures as compared to an unmodified plant.

[0028] It is another object of the present invention to provide a system and method of modifying a plant, to alter the metabolism or development of the plant.

[0029] In one embodiment, a gene of interest may be placed under control of a tissue specific promoter such that such gene of interest may be expressed in specific site, for example, the guard cells. The expression of the introduced genes may enhance the capacity of a plant to modulate guard cell activity in response to water stress. For instance, the transgene may help reduce stomatal water loss. In addition, other characteristics such as early maturation of plants may be introduced into plants to help cope with drought condition.

[0030] Preferably, the transgene is under control of a promoter, which may be a constitutive or inducible promoter. An inducible promoter is inactive under normal condition, and is activated under certain conditions to drive the expression of the gene under its control. Conditions that may activate a promoter include but are not limited to light, heat, certain nutrients or chemicals, and water conditions. A promoter that is activated under water deficit condition is preferred.

[0031] In another aspect, a tissue specific promoter, an organ specific promoter, or a cell-specific promoter may be employed to control the transgene. Despite their different names, these promoters are similar in that they are only activated in certain cell, tissue or organ types. It is to be understood that a gene under control of an inducible promoter, or a promoter specific for certain cells, tissues or organs may have low level of expression even under conditions that are not supposed to activate the promoter, a phenomenon known as “leaky expression” in the field. A promoter can be both inducible and tissue specific. By way of example, a transgene may be placed under control of a guard cell specific promoter such that the gene can be inducibly expressed in the guard cell of the transgenic plant.

[0032] In another aspect, the present disclosure provides a method of generating a transgenic plant having an altered stress response or an altered phenotype compared to an unmodified plant. The coding sequences of the genes that are disclosed to be upregulated may be placed under a promoter such that the genes can be expressed in the transgenic plant. The method may contain two steps: (a) introducing into a plant cell capable of being transformed and regenerated into a whole plant a construct comprising, in addition to the DNA sequences required for transformation and selection in plants, an expression construct including the coding sequence of a gene that a operatively linked to a promoter for expressing said DNA sequence; and (b) recovery of a plant which contains the expression construct.

[0033] The transgenic plant generated by the methods disclosed above may exhibit an altered trait or stress response. The altered traits may include increased tolerance to extreme temperature, such as heat or cold; or increased tolerance to extreme water condition such as drought or excessive water. The transgenic plant may exhibit one or more altered phenotype that may contribute to the resistance to drought condition. These phenotypes may include, by way of example, early maturation, increased growth rate, increased biomass, or increased lipid content.

[0034] In accordance with the disclosed methods, the coding sequence to be introduced in the transgenic plant preferably encodes a peptide having at least 70%, more preferably at least 90%, more preferably at least 98% identity, and even more preferably at least 99% identity to the polypeptide encoded by the RSDRGs disclosed in this application. In an alternative aspect, DNA sequence may be oriented in an antisense direction relative to said promoter within said construct.

[0035] In accordance with the methods of the present invention, the promoter is preferably selected from the group consisting of an constitutive promoter, an inducible promoter, a tissue specific promoter, and organ specific promoter, a cell-specific promoter. More preferably the promoter is an inducible promoter for expressing said DNA sequence under water deficit conditions.

[0036] In another aspect, the present invention provides a method of identifying whether a plant that has been successfully transformed with a construct, characterized in that the method comprises the steps of: (a) introducing into plant cells capable of being transformed and regenerated into whole plants a construct comprising, in addition to the DNA sequences required for transformation and selection in plants, an expression construct that includes a DNA sequence selected from at least one of the RSDRGs disclosed herein, said DNA sequence may be operatively linked to a promoter for expressing said DNA sequence; (b) regenerating the plant cells into whole plants; and (c) subjecting the plants to a screening process to differentiate between transformed plants and non-transformed plants.

[0037] The screening process may involve subjecting the plants to environmental conditions suitable to kill non-transformed plants, retain viability in transformed plants. For instance by growing the plants in a medium or soil that contains certain chemicals, such that only those plants expressing the transgenes can survive. In one particular embodiment, after obtaining a transgenic plant that appear to be expressing the transgene, a functional screening may be carried out by growing the plants under water deficit conditions to select for those that can tolerate such a condition.

[0038] In another aspect, the present disclosure provides a kit for generating a transgenic plant having an altered stress response or an altered phenotype compared to an unmodified plant, characterized in that the kit comprises: an expression construct including a DNA sequence selected from at least one of the RSDRGs disclosed herein, said DNA sequence may be operatively linked to an promoter suitable for expressing said DNA sequence in a plant cell.

[0039] Preferably the kit further includes targeting means for targeting the activity of the protein expressed from the construct to certain tissues or cells of the plant. Preferably the targeting means comprises an inducible, tissue-specific promoter for specific expression of the DNA sequence within certain tissues of the plant. Alternatively the targeting means may be a signal sequence encoded by said expression construct and may contain a series of amino acids covalently linked to the expressed protein.

[0040] In accordance with the kit of the present invention, the DNA sequence may encode a peptide having at least 70%, more preferably at least 90%, more preferably at least 98%, or even 99% identity to the peptide encoded by coding sequences selected from at least one of the RSDRGs disclosed herein. In one aspect, said DNA sequence may be oriented in an antisense direction relative to said promoter within said construct.

### BRIEF DESCRIPTION OF THE DRAWINGS

[0041] FIG. 1 illustrates a whole soybean seedling (A) and the root tip regions of the soybean seedling root (B).

[0042] FIG. 2 shows the numbers of genes that show differential expression at the same time point 5 hour (A) or 48 hour (B) between different root regions.

[0043] FIG. 3 shows the number of genes within the same root region, R1(A) or R2 (B), that are differentially expressed between two time points 5 hr and 48 hr after the plants have been subjected to water deficit conditions.

[0044] FIG. 4 shows the number of genes that are only differentially expressed in R1, R2 or both R1 and R2 regions of the root up to 48 hours after the plants are exposed to drought conditions (upper panel), and the number of genes that show differential expression at 5 hours, 48 hours after being exposed to drought conditions, as well as those that show differential expression at both 5 hours and 48 hours (lower panel).

[0045] FIG. 5 shows the number genes that are differentially expressed under drought condition only in the R2 region but not in the R3 region.

[0046] FIG. 6 presents pie charts illustrating the different functional categories of genes that show differential expression in the R1 (8A and 8B) or R2 (8C and 8D) regions after having been subjected to water deficit conditions for 5 hour (8A and 8C) or 48 hours (8B and 8D).

[0047] FIG. 7 shows the different categories of the “root region and stress specific transcripts” (RRSST) by their known or predicted function.

### DETAILED DESCRIPTION

[0048] The methods and materials described herein relate to gene expression profiling using microarrays, and follow-up analysis to decode the regulatory network that controls a plant's response to drought conditions. More particularly, drought response is analyzed at the molecular level to identify root specific genes and/or promoters which may be activated under water deficit conditions. The coding sequences of such genes may be introduced into a host plant to obtain transgenic plants that are more tolerant to drought than unmodified plants.

[0049] It is to be understood that the materials and methods are taught by way of example, and not by limitation. The disclosed instrumentalities may be broader than the particular methods and materials described herein, which may vary within the skill of the art. It is also to be understood that the terminology used herein is for the purpose of describing particular embodiments only, and is not intended to be limiting. Further, unless defined otherwise, all technical and scientific terms used herein have the same meaning as commonly understood by one of ordinary skill in the related art. The following terminology and grammatical variants are used in accordance with the definitions set out below.

[0050] The present disclosure provides genes whose expression levels are altered in response to stress conditions in soybean plants using genome-wide microarray (or gene chip) analysis of soybean plants grown under water deficit conditions. Those genes identified using microarray analysis may be subject to validation to confirm that their expression levels are altered under the stress conditions. Validation may be conducted using high throughput two-step qRT-PCR and by the delta delta CT method.

[0051] Sequences of those genes that have been validated may be subject to further sequence analysis by comparing their sequences to published sequences of various families of genes or proteins. For instance, some of these RSDRGs may encode proteins with substantial sequence similarity to known transcription factors. These transcription factors may play a role in the stress response by activating the transcription of other genes.

[0052] The present disclosure provides a system and a method for expressing a protein that may enhance a host's capability to grow or to survive in an adverse environment characterized by water deficit. Although plants are the most preferred host for purpose of this disclosure, the genetic constructs described herein may be introduced into other eukaryotic organisms, if the traits conferred upon these organisms by the constructs are desirable.

[0053] The term “genetically altered plant” or “genetically modified plant” refers to a plant whose genetic make-up has been altered or modified such that the modified plant expresses one or more protein that is not normally expressed by the unmodified plant or is expressed at different time or different tissue of the unmodified plant.

[0054] The term “transgenic plant” refers to a host plant into which a gene construct has been introduced. A gene construct, also referred to as a construct, an expression construct, or a DNA construct, generally contains as its components at least a coding sequence and a regulatory sequence. A gene construct typically contains at least on component that is foreign to the host plant. For purpose of this disclosure, all components of a gene construct may be from the host plant, but these components are not arranged in the host in the same manner as they are in the gene construct. A regulatory sequence is a non-coding sequence that typically contribute to the regulation of gene expression, at the transcription or translation levels. It is to be understood that certain segments in the coding sequence may be translated but may be later removed from the functional protein. An example of these segments is the so-called signal peptide, which may facilitate the maturation or localization of the translated protein, but is typically removed once the protein reaches its destination. Examples of a regulatory sequence include but are not limited to a promoter, an enhancer, and certain post-transcriptional regulatory elements.

[0055] After its introduction into a host plant, a gene construct may exist separately from the host chromosomes. Preferably, the entire gene construct, or at least part of it, is integrated onto a host chromosome. The integration may be mediated by a recombination event, which may be homologous, or non-homologous recombination. The term “express” or “expression” refers to production of RNAs using DNAs as template through transcription or translation of proteins from RNAs or the combination of both transcription and translation.

[0056] A “host cell,” as used herein, refers to a prokaryotic or eukaryotic cell that contains heterologous DNA which has been introduced into the cell by any means, e.g., electroporation, calcium phosphate precipitation, microinjection, transformation, viral infection, and/or the like. A “host plant” is a plant into which a transgene is to be introduced. A “parental plant” is the original plant into which genetic changes are to be introduced in order to create a genetically altered plant.

[0057] A “vector” is a composition for facilitating introduction, replication and/or expression of a selected nucleic acid in a cell. Vectors include, for example, plasmids, cosmids, viruses, yeast artificial chromosomes (YACs), etc. A “vector nucleic acid” is a nucleic acid vector into which heterologous nucleic acid is optionally inserted and which can then be introduced into an appropriate host cell. Vectors preferably have one or more origins of replication, and one or more sites into which the recombinant DNA can be inserted. Vectors often have convenient markers by which cells with vectors can be selected from those without. By way of example, a vector may encode a drug resistance gene to facilitate selection of cells that are transformed with the vector. Common vectors include plasmids, phages and other viruses, and “artificial chromosomes.” “Expression vectors” are vectors that comprise elements that provide for or facilitate transcription of nucleic acids which are cloned into the vectors. Such elements may include, for example, promoters and/or enhancers operably coupled to a nucleic acid of interest.

[0058] “Plasmids” generally are designated herein by a lower case “p” preceded and/or followed by capital letters and/or numbers, in accordance with standard nomenclatures that are familiar to those of skill in the art. Starting plasmids disclosed herein are either commercially available, publicly available on an unrestricted basis, or can be constructed from available plasmids by routine application of well known, published procedures. Many plasmids and other cloning and expression vectors are well known and readily available to those of skill in the art. Moreover, those of skill readily may construct any number of other plasmids suitable for use as described below. The properties, construction and use of such plasmids, as well as other vectors, is readily apparent to those of ordinary skill upon reading the present disclosure.

[0059] When a molecule is identified in or can be isolated from a organism, it can be said that such a molecule is derived from said organism. When two organisms have significant difference in the genetic materials in their respective genomes, these two organisms can be said to be genetically different. For purpose of this disclosure, the term “plant” means a whole plant, a seed, or any organ or tissue of a plant that may potentially develop into a whole plant.

[0060] The term “isolated” means that the material is removed from its original environment, such as the native or natural environment if the material is naturally occurring. For example, a naturally-occurring nucleic acid, polypeptide, or cell present in a living animal is not isolated, but the same polynucleotide, polypeptide, or cell separated from some or all of the coexisting materials in the natural system, is isolated, even if subsequently reintroduced into the natural system. Such nucleic acids can be part of a vector and/or such nucleic acids or polypeptides could be part of a composition, and still be isolated in that such vector or composition is not part of its natural environment.

[0061] A “recombinant nucleic acid” is one that is made by recombining nucleic acids, e.g., during cloning, DNA evolution or other procedures. A “recombinant polypeptide” is a polypeptide which is produced by expression of a recombinant nucleic acid. An “amino acid sequence” is a polymer of amino acid residues (a protein, polypeptide, etc.) or a character string representing an amino acid polymer, depending on context. Either the given nucleic acid or the complementary nucleic acid can be determined from any specified polynucleotide sequence.

[0062] The terms “nucleic acid,” or “polynucleotide” refer to a deoxyribonucleotide, in the case of DNA, or ribonucleotide in the case of RNA polymer in either single- or double-stranded form, and unless otherwise specified, encompasses known analogues of natural nucleotides that can be incorporated into nucleic acids in a manner similar to naturally occurring nucleotides. A “polynucleotide sequence” is a nucleic acid which is a polymer of nucleotides (A,C,T,U,G, etc. or naturally occurring or artificial nucleotide analogues) or a character string representing a nucleic acid, depending on context. Either the given nucleic acid or the complementary nucleic acid can be determined from any specified polynucleotide sequence.

[0063] A “subsequence” or “fragment” is any portion of an entire sequence of a DNA, an RNA or a polypeptide (also referred to as “a protein”) molecule, up to and including the full sequence. Typically a subsequence or fragment comprises less than the full-length sequence, and is sometimes referred to as the “truncated version.”

[0064] Nucleic acids and/or nucleic acid sequences are “homologous” when they are derived, naturally or artificially, from a common ancestral nucleic acid or nucleic acid sequence. Proteins and/or protein sequences are homologous when their encoding DNAs are derived, naturally or artificially, from a common ancestral nucleic acid or nucleic acid sequence. Similarly, nucleic acids and/or nucleic acid sequences are homologous when they are derived, naturally or artificially, from a common ancestral nucleic acid or nucleic acid sequence. The homologous molecules can be termed homologs. For example, any naturally occurring RSDRGs, as described herein, can be modified by any available mutagenesis method. When expressed, this mutagenized nucleic acid encodes a polypeptide that is homologous to the protein encoded by the original RSDRGs. Homology is generally inferred from sequence identity between two or more nucleic acids or proteins (or sequences thereof). The precise percentage of identity between sequences that is useful in establishing homology varies with the nucleic acid and protein at issue, but as little as 25% sequence identity is routinely used to establish homology. Higher levels of sequence identity, e.g., 30%, 40%, 50%, 60%, 70%, 80%, 90%, 95% or 99% or more can also be used to establish homology. Methods for determining sequence identity percentages (e.g., BLASTP and BLASTN using default parameters) are described herein and are generally available.

[0065] The terms “identical” or “sequence identity” in the context of two nucleic acid sequences or amino acid sequences of polypeptides refers to the residues in the two sequences which are the same when aligned for maximum correspondence over a specified comparison window. A “comparison window”, as used herein, refers to a segment of at least about 20 contiguous positions, usually about 50 to about 200, more usually about 100 to about 150 in which a sequence may be compared to a reference sequence of the same number of contiguous positions after the two sequences are aligned optimally. Methods of alignment of sequences for comparison are well-known in the art. Optimal alignment of sequences for comparison may be conducted by the local homology algorithm of Smith and Waterman (1981) Adv. Appl. Math. 2:482; by the alignment algorithm of Needleman and Wunsch (1970) J. Mol. Biol. 48:443; by the search for similarity method of Pearson and Lipman (1988) Proc. Nat. Acad. Sci. U.S.A. 85:2444; by computerized implementations of these algorithms (including, but not limited to CLUSTAL in the PC/Gene program by Intelligentics, Mountain View Calif., GAP, BESTFIT, BLAST, FASTA, and TFASTA in the Wisconsin Genetics Software Package, Genetics Computer Group (GCG), 575 Science Dr., Madison, Wis., U.S.A.); the CLUSTAL program is well described by Higgins and Sharp (1988) Gene 73:237-244 and Higgins and Sharp (1989) CABIOS 5:151-153; Corpet et al. (1988) Nucleic Acids Res. 16:10881-10890; Huang et al (1992) Computer Applications in the Biosciences 8:155-165; and Pearson et al. (1994) Methods in Molecular Biology 24:307-331. Alignment is also often performed by inspection and manual alignment.

[0066] In one class of embodiments, the polypeptides herein are at least 70%, generally at least 75%, optionally at least 80%, 85%, 90%, 98% or 99% or more identical to a reference polypeptide, e.g., those that are encoded by DNA sequences as set forth by any one of the RSDRGs disclosed herein or a fragment thereof, e.g., as measured by BLASTP (or CLUSTAL, or any other available alignment software) using default parameters. Similarly, nucleic acids can also be described with reference to a starting nucleic acid, e.g., they can be 50%, 60%, 70%, 75%, 80%, 85%, 90%, 98%, 99% or more identical to a reference nucleic acid, e.g., those that are set forth by any one of the RSDRGs disclosed herein or a fragment thereof, e.g., as measured by BLASTN (or CLUSTAL, or any other available alignment software) using default parameters. When one molecule is said to have certain percentage of sequence identity with a larger molecule, it means that when the two molecules are optimally aligned, said percentage of residues in the smaller molecule finds a match residue in the larger molecule in accordance with the order by which the two molecules are optimally aligned.

[0067] The term “substantially identical” as applied to nucleic acid or amino acid sequences means that a nucleic acid or amino acid sequence comprises a sequence that has at least 90% sequence identity or more, preferably at least 95%, more preferably at least 98% and most preferably at least 99%, compared to a reference sequence using the programs described above (preferably BLAST) using standard parameters. For example, the BLASTN program (for nucleotide sequences) uses as defaults a word length (W) of 11, an expectation (E) of 10, M=5, N=−4, and a comparison of both strands. For amino acid sequences, the BLASTP program uses as defaults a word length (W) of 3, an expectation (E) of 10, and the BLOSUM62 scoring matrix (see Henikoff & Henikoff, Proc. Natl. Acad. Sci. USA 89:10915 (1989)). Percentage of sequence identity is determined by comparing two optimally aligned sequences over a comparison window, wherein the portion of the polynucleotide sequence in the comparison window may comprise additions or deletions (i.e., gaps) as compared to the reference sequence (which does not comprise additions or deletions) for optimal alignment of the two sequences. The percentage is calculated by determining the number of positions at which the identical nucleic acid base or amino acid residue occurs in both sequences to yield the number of matched positions, dividing the number of matched positions by the total number of positions in the window of comparison and multiplying the result by 100 to yield the percentage of sequence identity. Preferably, the substantial identity exists over a region of the sequences that is at least about 50 residues in length, more preferably over a region of at least about 100 residues, and most preferably the sequences are substantially identical over at least about 150 residues. In a most preferred embodiment, the sequences are substantially identical over the entire length of the coding regions.

[0068] The term “polypeptide” is used interchangeably with the terms “polypeptides” and “protein(s)”, and refers to a polymer of amino acid residues. A ‘mature protein’ is a protein which is full-length and which, optionally, includes glycosylation or other modifications typical for the protein in a given cellular environment.

[0069] The term “variant” or “mutant” with respect to a polypeptide refers to an amino acid sequence that is altered by one or more amino acids with respect to a reference sequence. The variant may have “conservative” changes, wherein a substituted amino acid has similar structural or chemical properties, e.g., replacement of leucine with isoleucine. Alternatively, a variant may have “nonconservative” changes, e.g., replacement of a glycine with a tryptophan. Analogous minor variation can also include amino acid deletion or insertion, or both. Guidance in determining which amino acid residues can be substituted, inserted, or deleted without eliminating biological or immunological activity can be found using computer programs well known in the art, for example, DNASTAR software.

[0070] A variety of additional terms are defined or otherwise characterized herein. In practicing the instrumentalities described herein, many conventional techniques in molecular biology, microbiology, and recombinant DNA are optionally used. These techniques are well known to those of ordinary skill in the art. For example, one skilled in the art would be familiar with techniques for in vitro amplification methods, including the polymerase chain reaction (PCR), for the production of the homologous nucleic acids described herein.

[0071] In addition, commercially available kits may facilitate the purification of plasmids or other relevant nucleic acids from cells. See, for example, EasyPrep™ and FlexiPrep™ kits, both from Pharmacia Biotech; StrataClean™ from Stratagene; and, QIAprep™ from Qiagen. Any isolated and/or purified nucleic acid can be further manipulated to produce other nucleic acids, used to transfect cells, incorporated into related vectors to infect organisms, or the like. Typical cloning vectors contain transcription terminators, transcription initiation sequences, and promoters useful for regulation of the expression of the particular target nucleic acid. The vectors optionally comprise generic expression cassettes containing at least one independent terminator sequence, sequences permitting replication of the cassette in eukaryotes, or prokaryotes, or both, (e.g., shuttle vectors) and selection markers for both prokaryotic and eukaryotic systems. Vectors are suitable for replication and integration in prokaryotes, eukaryotes, or both.

[0072] Various types of mutagenesis are optionally used to modify RSDRGs and their encoded polypeptides, as described herein, to produce conservative or non-conservative variants. Any available mutagenesis procedure can be used. Such mutagenesis procedures optionally include selection of mutant nucleic acids and polypeptides for one or more activity of interest. Procedures that can be used include, but are not limited to: site-directed point mutagenesis, random point mutagenesis, in vitro or in vivo homologous recombination (DNA shuffling), mutagenesis using uracil-containing templates, oligonucleotide-directed mutagenesis, phosphorothioate-modified DNA mutagenesis, mutagenesis using gapped duplex DNA, point mismatch repair, mutagenesis using repair-deficient host strains, restriction-selection and restriction-purification, deletion mutagenesis, mutagenesis by total gene synthesis, double-strand break repair, mutagenesis by chimeric constructs, and many others known to persons of skill in the art.

[0073] In one embodiment, mutagenesis can be guided by known information about the naturally occurring molecule or altered or mutated naturally occurring molecule. By way of example, this known information may include sequence, sequence comparisons, physical properties, crystal structure and the like. In another class of mutagenesis, modification is essentially random, e.g., as in classical DNA shuffling.

[0074] Polypeptides may include variants, in which the amino acid sequence has at least 70% identity, preferably at least 80% identity, typically 90% identity, preferably at least 95% identity, more preferably at least 98% identity and most preferably at least 99% identity, to the amino acid sequences as encoded by the DNA sequences set forth in any one of the RSDRGs disclosed herein.

[0075] The aforementioned polypeptides may be obtained by any of a variety of methods. Smaller peptides (less than 50 amino acids long) are conveniently synthesized by standard chemical techniques and can be chemically or enzymatically ligated to form larger polypeptides. Polypeptides can be purified from biological sources by methods well known in the art, for example, as described in Protein Purification, Principles and Practice, Second Edition Scopes, Springer Verlag, N.Y. (1987) Polypeptides are optionally but preferably produced in their naturally occurring, truncated, or fusion protein forms by recombinant DNA technology using techniques well known in the art. These methods include, for example, in vitro recombinant DNA techniques, synthetic techniques and in vivo genetic recombination. See, for example, the techniques described in Sambrook et al. (2001) Molecular Cloning, A Laboratory Manual, Third Edition, Cold Spring Harbor Press, N.Y.; and Ausubel et al., eds. (1997) Current Protocols in Molecular Biology, Green Publishing Associates, Inc., and John Wiley & Sons, Inc., N.Y. (supplemented through 2002). RNA encoding the proteins may also be chemically synthesized. See, for example, the techniques described in Oligonucleotide Synthesis, (1984) Gait ed., IRL Press, Oxford, which is incorporated by reference herein in its entirety.

[0076] The nucleic acid molecules described herein may be expressed in a suitable host cell or an organism to produce proteins. Expression may be achieved by placing a nucleotide sequence encoding these proteins into an appropriate expression vector and introducing the expression vector into a suitable host cell, culturing the transformed host cell under conditions suitable for expression of the proteins described or variants thereof, or a polypeptide that comprises one or more domains of such proteins. The recombinant proteins from the host cell may be purified to obtain purified and, preferably, active protein. Alternatively, the expressed protein may be allowed to function in the intact host cell or host organism.

[0077] Appropriate expression vectors are known in the art, and may be purchased or applied for use according to the manufacturer's instructions to incorporate suitable genetic modifications. For example, pET-14b, pcDNA1Amp, and pVL1392 are available from Novagen and Invitrogen, and are suitable vectors for expression in E. coli, mammalian cells and insect cells, respectively. These vectors are illustrative of those that are known in the art, and many other vectors can be used for the same purposes. Suitable host cells can be any cell capable of growth in a suitable media and allowing purification of the expressed protein. Examples of suitable host cells include bacterial cells, such as E. coli, Streptococci, Staphylococci, Streptomyces and Bacillus subtilis cells; fungal cells such as Saccharomyces and Aspergillus cells; insect cells such as Drosophila S2 and Spodoptera Sf9 cells, mammalian cells such as CHO, COS, HeLa, 293 cells; and plant cells.

[0078] Culturing and growth of the transformed host cells can occur under conditions that are known in the art. The conditions will generally depend upon the host cell and the type of vector used. Suitable culturing conditions may be used such as temperature and chemicals and will depend on the type of promoter utilized.

[0079] Purification of the proteins or domains of such proteins, if desired, may be accomplished using known techniques without performing undue experimentation. Generally, the transformed cells expressing one of these proteins are broken, crude purification occurs to remove debris and some contaminating proteins, followed by chromatography to further purify the protein to the desired level of purity. Host cells may be broken by known techniques such as homogenization, sonication, detergent lysis and freeze-thaw techniques. Crude purification can occur using ammonium sulfate precipitation, centrifugation or other known techniques. Suitable chromatography includes anion exchange, cation exchange, high performance liquid chromatography (HPLC), gel filtration, affinity chromatography, hydrophobic interaction chromatography, etc. Well known techniques for refolding proteins can be used to obtain the active conformation of the protein when the protein is denatured during intracellular synthesis, isolation or purification.

[0080] In general, RSDRG proteins or domains, or antibodies to such proteins can be purified, either partially (e.g., achieving a 5×, 10×, 100×, 500×, or 1000× or greater purification), or even substantially to homogeneity (e.g., where the protein is the main component of a solution, typically excluding the solvent (e.g., water or DMSO) and buffer components (e.g., salts and stabilizers) that the protein is suspended in, e.g., if the protein is in a liquid phase), according to standard procedures known to and used by those of skill in the art. Accordingly, the polypeptides can be recovered and purified by any of a number of methods well known in the art, including, e.g., ammonium sulfate or ethanol precipitation, acid or base extraction, column chromatography, affinity column chromatography, anion or cation exchange chromatography, phosphocellulose chromatography, hydrophobic interaction chromatography, hydroxylapatite chromatography, lectin chromatography, gel electrophoresis and the like. Protein refolding steps can be used, as desired, in making correctly folded mature proteins. High performance liquid chromatography (HPLC), affinity chromatography or other suitable methods can be employed in final purification steps where high purity is desired. In one embodiment, antibodies made against the proteins described herein are used as purification reagents, e.g., for affinity-based purification of proteins comprising one or more RSDRG protein domains or antibodies thereto. Once purified, partially or to homogeneity, as desired, the polypeptides are optionally used e.g., as assay components, therapeutic reagents or as immunogens for antibody production.

[0081] In addition to other references noted herein, a variety of purification methods are well known in the art, including, for example, those set forth in R. Scopes, Protein Purification, Springer-Verlag, N.Y. (1982); Deutscher, Methods in Enzymology Vol. 182: Guide to Protein Purification, Academic Press, Inc. N.Y. (1990); Sandana, Bioseparation of Proteins, Academic Press, Inc. (1997); Bollag et al., Protein Methods, 2nd Edition Wiley-Liss, NY; Walker (1996) The Protein Protocols Handbook Humana Press, NJ; Harris and Angal Protein Purification Applications: A Practical Approach IRL Press at Oxford, Oxford, England (1990); Scopes, Protein Purification. Principles and Practice 3rd Edition Springer Verlag, NY (1993); Janson and Ryden, Protein Purification: Principles, High Resolution Methods and Applications, Second Edition Wiley-VCH, NY (1998); and Walker, Protein Protocols on CD-ROM Humana Press, NJ (1998); and the references cited therein.

[0082] After synthesis, expression and/or purification, proteins may possess a conformation different from the desired conformations of the relevant polypeptides. For example, polypeptides produced by prokaryotic systems often are optimized by exposure to chaotropic agents to achieve proper folding. During purification from, e.g., lysates derived from E. coli, the expressed protein is optionally denatured and then renatured. This is accomplished, e.g., by solubilizing the proteins in a chaotropic agent such as guanidine HCl. In general, it is occasionally desirable to denature and reduce expressed polypeptides and then to cause the polypeptides to re-fold into the preferred conformation. For example, guanidine, urea, DTT, DTE, and/or a chaperonin can be added to a translation product of interest. Methods of reducing, denaturing and renaturing proteins are well known to those of skill in the art. Debinski, et al., for example, describe the denaturation and reduction of inclusion body proteins in guanidine-DTE. The proteins can be refolded in a redox buffer containing, e.g., oxidized glutathione and L-arginine. Refolding reagents can be flowed or otherwise moved into contact with the one or more polypeptide or other expression product, or vice-versa.

[0083] In another aspect, antibodies to the RSDRG proteins or fragments thereof may be generated using methods that are well known in the art. The antibodies may be utilized for detecting and/or purifying the RSDRG proteins, optionally discriminating the proteins from various homologues. As used herein, the term “antibody” includes, but is not limited to, polyclonal antibodies, monoclonal antibodies, humanized or chimeric antibodies and biologically functional antibody fragments, which are those fragments sufficient for binding of the antibody fragment to the protein.

[0084] General protocols that may be adapted for detecting and measuring the expression of the described RSDRG proteins using the above mentioned antibodies are known. Such methods include, but are not limited to, dot blotting, western blotting, competitive and noncompetitive protein binding assays, enzyme-linked immunosorbant assays (ELISA), immunohistochemistry, fluorescence-activated cell sorting (FACS), and other protocols that are commonly used and widely described in scientific and patent literature.

[0085] Sequence of the RSDRG genes may also be used in genetic mapping of plants or in plant breeding. Polynucleotides derived from the RSDRG gene sequences may be used in in situ hybridization to determine the chromosomal locus of the RSDRG genes on the chromosomes. These polynucleotides may also be used to detect segregation of different alleles at certain RSDRG loci.

[0086] Sequence information of the RSDRG genes may also be used to design oligonucleotides for detecting RSDRG mRNA levels in the cells or in plant tissues. For example, the oligonucleotides can be used in a Northern blot analysis to quantify the levels of RSDRG mRNA. Moreover, full-length or fragment of the RSDRG genes may be used in preparing microarrays (or gene chips). Full-length or fragment of the RSDRG genes may also be used in microarray experiments to study expression profile of the RSDRG genes. High-throughput screening can be conducted to measure expression levels of the RSDRG genes in different cells or tissues. Various compounds or other external factors may be screened for their effects expression of the RSDRG gene expression.

[0087] Sequences of the RSDRG genes and proteins may also provide a tool for identification of other proteins that may be involved in plant drought response. For example, chimeric RSDRG proteins can be used as a “bait” to identify other proteins that interact with RSDRG proteins in a yeast two-hybrid screening. Recombinant RSDRG proteins can also be used in pull-down experiment to identify their interacting proteins. These other proteins may be cofactors that enhance the function of the RSDRG proteins, or they may be RSDRG proteins themselves which have not been identified in the experiments disclosed herein.

[0088] The RSDRG polypeptides may possess structural features which can be recognized, for example, by using immunological assays. The generation of antisera which specifically bind the RSDRG polypeptides, as well as the polypeptides which are bound by such antisera, are a feature of the disclosed embodiments.

[0089] In order to produce antisera for use in an immunoassay, one or more of the immunogenic RSDRG polypeptides or fragments thereof are produced and purified as described herein. For example, recombinant protein may be produced in a host cell such as a bacterial or an insect cell. The resultant proteins can be used to immunize a host organism in combination with a standard adjuvant, such as Freund's adjuvant. Commonly used host organisms include rabbits, mice, rats, donkeys, chickens, goats, horses, etc. An inbred strain of mice may also be used to obtain more reproducible results due to the virtual genetic identity of the mice. The mice are immunized with the immunogenic RSDRG polypeptides in combination with a standard adjuvant, such as Freund's adjuvant, and a standard mouse immunization protocol. See, for example, Harlow and Lane, Antibodies, A Laboratory Manual, Cold Spring Harbor Publications, New York (1988), which provides comprehensive descriptions of antibody generation, immunoassay formats and conditions that can be used to determine specific immunoreactivity. Alternatively, one or more synthetic or recombinant RSDRG polypeptides or fragments thereof derived from the sequences disclosed herein is conjugated to a carrier protein and used as an immunogen.

[0090] Antisera that specifically bind the RSDRG proteins may be used in a range of applications, including but not limited to immunofluorescence staining of cells for the expression level and localization of the RSDRG proteins, cytological staining for the expression of RSDRG proteins in tissues, as well as in Western blot analysis.

[0091] Another aspect of the disclosure includes screening for potential or candidate modulators of RSDRG protein activity. For example, potential modulators may include small molecules, organic molecules, inorganic molecules, proteins, hormones, transcription factors, or the like, which can be contacted to a cell or certain tissues that express the RSDRG proteins to assess the effects, if any, of the candidate modulator upon RSDRG protein activity.

[0092] Alternatively, candidate modulators may be screened to modulate expression of RSDRG proteins. For example, potential modulators may include small molecules, organic molecules, inorganic molecules, proteins, hormones, transcription factors, or the like, which can be contacted to a cell or certain tissues that express the RSDRG proteins, to assess the effects, if any, of the candidate modulator upon RSDRG protein expression. Expression of a RSDRG gene described herein may be detected, for example, via Northern blot analysis or quantitative (optionally real time) RT-PCR, before and after application of potential expression modulators. Alternatively, promoter regions of the various RSDRG genes may be coupled to reporter constructs including, without limitation, CAT, beta-galactosidase, luciferase or any other available reporter, and may similarly be tested for expression activity modulation by the candidate modulator. Promoter regions of the various genes are generally sequences in the proximity upstream of the start site of transcription, typically within 1 Kb or less of the start site, such as within 500 bp, 250 bp or 100 bp of the start site. In certain cases, a promoter region may be located between 1 and 5 Kb from the start site.

[0093] In either case, whether the assay is to detect modulated activity or expression, a plurality of assays may be performed in a high-throughput fashion, for example, using automated fluid handling and/or detection systems in serial or parallel fashion. Similarly, candidate modulators can be tested by contacting a potential modulator to an appropriate cell using any of the activity detection methods herein, regardless of whether the activity that is detected is the result of activity modulation, expression modulation or both.

[0094] A method of modifying a plant may include introducing into a host plant one or more RSDRG genes described above. The RSDRG genes may be placed in an expression construct, which may be designed such that the RSDRG protein(s) are expressed constitutively, or inducibly. The construct may also be designed such that the RSDRG protein(s) are expressed in certain tissue(s), but not in other tissue(s). The RSDRG protein(s) may enhance the ability of the host plant in drought tolerance, such as by reducing water loss or by other mechanisms that help a plant cope with water deficit growth conditions. The host plant may include any plants whose growth and/or yield may be enhanced by a modified drought response. Methods for generating such transgenic plants is well known in the field. See e.g., Leandro Peña (Editor), Transgenic Plants: Methods and Protocols (Methods in Molecular Biology), Humana Press, 2004.

[0095] The use of gene inhibition technologies such as antisense RNA or co-suppression or double stranded RNA interference is also within the scope of the present disclosure. In these approaches, the isolated gene sequence is operably linked to a suitable regulatory element. In one embodiment of the disclosure, the construct contains a DNA expression cassette that contains, in addition to the DNA sequences required for transformation and selection in said cells, a DNA sequence that encodes a RSDRG proteins or a RSDRG modulator protein, with at least a portion of said DNA sequence in an antisense orientation relative to the normal presentation to the transcriptional regulatory region, operably linked to a suitable transcriptional regulatory region such that said recombinant DNA construct expresses an antisense RNA or portion thereof of an antisense RNA in the resultant transgenic plant.

[0096] It is apparent to one of skill in the art that the polynucleotide encoding the RSDRG proteins or a RSDRG modulator proteins can be in the antisense (for inhibition by antisense RNA) or sense (for inhibition by co-suppression) orientation, relative to the transcriptional regulatory region. Alternatively a combination of sense and antisense RNA expression can be utilized to induce double stranded RNA interference. See, e.g., Chuang and Meyerowitz, PNAS 97: 4985-4990, 2000; see also Smith et al., Nature 407: 319-320, 2000.

[0097] These methods for generation of transgenic plants generally entail the use of transformation techniques to introduce the gene or construct encoding the RSDRG proteins or a RSDRG modulator proteins, or a part or a homolog thereof, into plant cells. Transformation of a plant cell can be accomplished by a variety of different methodology. Methods that have general utility include, for example, Agrobacterium based systems, using either binary and/or cointegrate plasmids of both A. tumifaciens and A. rhyzogenies, (See e.g., U.S. Pat. No. 4,940,838, U.S. Pat. No. 5,464,763), the biolistic approach (See e.g., U.S. Pat. No. 4,945,050, U.S. Pat. No. 5,015,580, U.S. Pat. No. 5,149,655), microinjection, (See e.g., U.S. Pat. No. 4,743,548), direct DNA uptake by protoplasts, (See e.g., U.S. Pat. No. 5,231,019, U.S. Pat. No. 5,453,367) or needle-like whiskers (See e.g., U.S. Pat. No. 5,302,523). Any method for the introduction of foreign DNA into a plant cell and for expression therein may be used within the context of the present disclosure.

[0098] Plants that are capable of being transformed encompass a wide range of species, including but not limited to soybean, corn, potato, rice, wheat and many other crops, fruit plants, vegetables and tobacco. See generally, Vain, P., Thirty years of plant transformation technology development, Plant Biotechnol J. 2007 March; 5(2):221-9. Any plants that are capable of taking in foreign DNA and transcribing the DNA into RNA and/or further translating the RNA into a protein may be a suitable host.

[0099] The modulators described above that may alter the expression levels or the activity of the RSDRG proteins (collectively called RSDRG modulators) may also be introduced into a host plant in the same or similar manner as described above. In one embodiment, the RSDRG modulators are primarily transcription factors that regulate the transcription of the RSDRGs.

[0100] The RSDRG proteins or the RSDRG modulators may be used to modify a target plant by causing them to be assimilated by the plant. Alternatively, the RSDRG proteins or the RSDRG modulators may be applied to a target plant by causing them to be in contact with the plant, or with a specific organ or tissue of the plant. In one embodiment, organic or inorganic molecules that can function as RSDRG modulators may be caused to be in contact with a plant such that these chemicals may enhance the drought response of the target plant.

[0101] In addition to the RSDRG modulators, RSDRG polypeptides or RSDRG nucleic acids, a composition containing other ingredients may be introduced, administered or delivered to the plant to be modified. In one aspect, a composition containing an agriculturally acceptable ingredient may be used in conjunction with the RSDRG modulators to be administered or delivered to the plant.

[0102] Bioinformatic systems are widely used in the art, and can be utilized to identify homology or similarity between different character strings, or can be used to perform other desirable functions such as to control output files, provide the basis for making presentations of information including the sequences and the like. Examples include BLAST, discussed supra. For example, commercially available databases, computers, computer readable media and systems may contain character strings corresponding to the sequence information herein for the RSDRG polypeptides and nucleic acids described herein. These sequences may include specifically the RSDRG sequences listed herein and the various silent substitutions and conservative substitutions thereof.

[0103] The bioinformatic systems contain a wide variety of information that includes, for example, a complete sequence listings for the entire genome of an individual organism representing a species. Thus, for example, using the RSDRG sequences as a basis for comparison, the bioinformatic systems may be used to compare different types of homology and similarity of various stringency and length on the basis of reported data. These comparisons are useful to identify homologs or orthologs where, for example, the basic RSDRG gene ortholog is shown to be conserved across different organisms. Thus, the bioinformatic systems may be used to detect or recognize the homologs or orthologs, and to predict the function of recognized homologs or orthologs. By way of example, many homology determination methods have been designed for comparative analysis of sequences of biopolymers including nucleic acids, proteins, etc. With an understanding of hydrogen bonding between the principal bases in natural polynucleotides, models that simulate annealing of complementary homologous polynucleotide strings can also be used as a foundation of sequence alignment or other operations typically performed on the character strings corresponding to the sequences herein. One example of a software package for calculating sequence similarity is BLAST, which can be adapted to the present invention by inputting character strings corresponding to the sequences herein.

[0104] The software can also include output elements for controlling nucleic acid synthesis (e.g., based upon a sequence or an alignment of a sequences herein) or other operations which occur downstream from an alignment or other operation performed using a character string corresponding to a sequence herein.

[0105] In an additional aspect, kits may embody any of the methods, compositions, systems or apparatus described above. Kits may optionally comprise one or more of the following: (1) a composition, system, or system component as described herein; (2) instructions for practicing the methods described herein, and/or for using the compositions or operating the system or system components herein; (3) a container for holding components or compositions, and, (4) packaging materials.

### EXAMPLES

[0106] The following nonlimiting examples report general procedures, reagents and characterization methods that teach by way of example, and should not be construed in a narrowing manner that limits the disclosure to what is specifically disclosed. Those skilled in the art will understand that numerous modifications may be made and still the result will fall within the spirit and scope of the present invention.

### Example 1

### Differential Gene Expression of Drought Response Genes in Soybean Roots

[0107] The overall goal of these experiments is to identify potential gene(s) that may confer upon a plant the capability to grow and reproduce under water deficit conditions. The first step towards accomplishing this goal is to characterize the transcription profiles in regions of growth maintenance and inhibition in soybean roots under water deficit conditions in comparison to well-watered conditions. Another approach taken in this disclosure is to compare the transcription profiles in the root regions of soybean with those from other plants, such as maize. One specific objective is to characterize the transcriptome of apical and basal regions of soybean root growth zone under water deficit conditions for a short (5 h) and long (48 h) period. Soybean Genechips manufactured by Affymetrix were used.

[0108] Briefly, young Magellan soybean plants were subject to water deficit stress treatment for 5 h or 48 h. Root regions 1 and 3 from well watered samples and root regions 1 and 2 from water stressed (or deficit) samples were collected in triplicate. Total RNA isolation and microarray hybridizations were conducted using standard protocols such as the protocols described in U.S. patent application Ser. No. 12/138,392 (US2009/0210968). 60K soybean Affymetrix GeneChip (total 30) and the pair wise comparison experimental plan were used for the microarray experiments.

[0109] More specifically, a soybean seedling system was used for these experiments. Soybean (Glycine max L.) line Magellan seeds were sterilized with 20% bleach for 2 minutes and rinsed with running tap water for about 20 minutes. Seeds were then placed on germination paper saturated with 10 mM CaCl₂ and 10 mM Ca(NO₃)₂ solutions and germinated in the dark at 29° C. and nearly 100% relative humidity. A mixture of vermiculite and Turface at a 1:1 volumetric ratio was used as the culture medium. Plastic tubes covered with fiberglass mesh at the bottom and plastic boxes were used as growth containers and were filled with either well-watered (pre-soaked with 10 mM CaCl₂ and 10 mM Ca(NO₃)₂ solution) or water-stressed medium. The water-stressed medium was pre-mixed with 10 mM CaCl₂ and 10 mM Ca(NO₃)₂ solutions to a water potential of about −1.6 MPa as measured with isopiestic thermocouple psychrometers (Boyer and Knipling, 1965). The plastic tubes and boxes containing culture medium were then placed in the humid room, where the parameters were set for seedling growth (temperature: 29° C. and 100% RH, no light), for one day before transplanting.

[0110] Uniform seedlings with a root length of 11-25 mm were transplanted to boxes and tubes containing either well-watered or water-stressed medium. At 5 h, 12 h, 24 h, and 48 hours after transplanting, three biological replicates of soybean seedlings were harvested. Samples from 5 h and 48 h timpoints (earlier and later stages of water deficit) after transplanting were used for the microarray analysis. Samples from 5 h, 12 h, 24 h, and 48 hours after transplanting were used to conduct qRTPCR analysis of the transcription factors and other selected genes from the microarray results. The 5 h, 12 h, and 24 h time points were chosen to permit the identification of early-responsive transcription factors after the initiation of water-stress treatment and before root growth reached the steady state (Sharp et al. 2004). The 48 h time point was selected to identify transcription factors that might be responsible for the changes associated with the steady-state patterns of the relative elongation rate of soybean seedling roots in response to water-stress conditions.

[0111] The soybean seedlings were grown to about 6-10 cm tall. The primary roots of these soybeans seedlings were dissected into 3 regions based on previously characterized expansion profiles: Region 1(R1) is 0-4 mm from the root tip (including the root cap), Region 2 (R2) is 4-8 mm from the root tip, and Region 3 (R3) is 8-15 mm from the root tip. See FIG. 1. Regions 1-2 and regions 1-3 were collected in water-stressed roots and well-watered roots, respectively. These root regions were immediately frozen in liquid nitrogen and then stored at −80° C. for RNA isolation and microarray analysis. Comparison of gene expression between region 2 of water-stressed roots and region 3 of well-watered roots may help distinguish the responses induced by water stress from responses resulting from changes in normal growth deceleration.

[0112] The soybean primary root adapts to low water potential (e.g., Ψ_{w}, −1.6 MPa) by maintaining longitudinal expansion in the apical 4 mm (region 1), whereas in the adjacent 4 mm (region 2) longitudinal expansion reaches a maximum in well-watered roots but is progressively inhibited at low Ψ_{w} (Yamaguchi et al. 2009). To identify mechanisms that determine these responses to low Ψ_{w}, and to elucidate the regulatory networks involved, the gene expression patterns in these regions of water-stressed and well-watered roots were profiled. Also, the gene expression between region 2 of water-stressed roots and the growth deceleration zone in well-watered roots (region 3) were compared to help distinguish stress-responsive genes in region 2 from those involved in cell maturation. The results reveal that stress-responsive transcripts are largely root region specific. The differentially expressed transcripts (also termed “DET”) were then compared to the available soybean genome sequence information, and the major metabolic and transcriptional regulatory pathways involved in the response to water deficit conditions.

[0113] FIG. 2 shows the numbers of genes that showed differential expression at the same time point between different root regions. As shown in the upper panel of FIG. 2, 548 (173+375) genes show differential expression in the R1 region after 5 hour under drought conditions (Table 1). By contrast, 753 (378+375) genes show differential expression in the R2 region after 5 hour under drought conditions (Table 2). Among these genes, 375 genes are differentially expressed after 5 hour under water deficit conditions in both the R1 and R2 regions (Table 3), while 173 genes show R1 specific differential expression and 378 genes show R2 specific differential expression at the 5 hour time point.

[0114] As shown in the lower panel of FIG. 2, 650 (111+539) genes show differential expression in the R1 region after 48 hour under drought conditions (Table 4). By contrast, 1234 (695+539) genes show differential expression in the R2 region after 48 hour under drought conditions (Table 5). Among these genes, 539 genes are differentially expressed after 48 hour under water deficit conditions in both the R1 and R2 regions (Table 6), while 111 genes show R1 specific differential expression and 695 genes show R2 specific differential expression at the 48 hour time point.

[0115] The number of genes that are differentially expressed within the same root region are compared between the two time points, namely, 5 hr and 48 hr after the plants have been subjected to water deficit conditions (FIG. 3). Out of the 548 genes found to be differentially expressed in the R1 region after 5 hour under water deficit conditions (Table 7), 290 genes are differentially expressed in the R1 region only after 5 hours, but not after 48 hours, under drought conditions (Table 8). Out of the 650 genes found to be differentially expressed after 48 hour under water deficit conditions (Table 9), 392 genes are differentially expressed in the R1 region only after 48 hours, but not after 5 hours, under drought conditions (Table 10). Similarly, out of the 753 genes found to be differentially expressed in the R2 region after 5 hour under water deficit conditions (Table 11), 333 genes are differentially expressed in the R1 region only after 5 hours, but not after 48 hours, under drought conditions (Table 12). Out of the 1234 genes found to be differentially expressed in the R2 region after 48 hour under water deficit conditions (Table 13), 814 genes are differentially expressed in the R2 region only after 48 hours, but not after 5 hours, under drought conditions (Table 14).

[0116] The upper panel of FIG. 4 shows genes that are only differentially expressed in R1, R2 or both R1 and R2 regions of the root up to 48 hours after the plants are exposed to drought conditions, which include the 5 h and 48 h time points. Out of a total of 940 (290+258+392 as shown in FIG. 3) genes that are differentially expressed at 5 hr and 48 hour after being exposed to drought conditions, 131 genes are only differentially expressed in the R1 region (Table 15). Out of a total of 1567 (333+420+814 as shown in FIG. 3) genes that are differentially expressed at 5 hr and 48 hour after being exposed to drought conditions, 758 genes show differential expression under drought conditions only in R2 region of the root (Table 16). Interestingly, 809 genes show differential expression in both R1 and R2 regions after 5 hr or 48 hour exposure to drought conditions.

[0117] As shown in the lower panel of FIG. 4, out of the total of 926 genes that show differential expression in both R1 and R2 regions 5 hours after being subjected to drought conditions, 236 genes show differential expression after 5 hour, but not after 48 hours exposure to drought conditions. Differential expression was observed in 903 genes only after 48 hours, but not at 5 hours after exposure to drought conditions. 690 genes show differential expression both at 5 hours and 48 hours after exposure to drought conditions.

[0118] As shown in FIG. 5, 1125 genes were found to be differentially expressed under drought condition only in the R2 region but not in the R3 region. Conversely, 190 genes are differentially expressed under drought condition only in the R3 region but not in the R2 region. The R2 and R3 regions also share 442 genes that are commonly expressed in both regions under drought conditions. Most of these 442 genes likely represent genes that are implicated in maturation and/or growth of the roots, but are not specifically induced by the water deficit conditions.

[0119] FIG. 6 presents pie charts illustrating the different functional categories of genes that show differential expression in the R1 (8A and 8B) or R2 (8C and 8D) regions after having been subjected to water deficit conditions for 5 hour (8A and 8C) or 48 hours (8B and 8D). DET stands for “Differentially Expressed Transcripts.”

[0120] FIG. 7 shows the different categories of the “root region and stress specific transcripts” (RRSST) by their known or predicted function.

### Example 2

### Comparison of the Gene Expression Patterns Under Drought Conditions in the Root Regions of Soybean and Maize

[0121] To gain insight into whether the gene expression pattern in response to drought differs among different species, the root region specific and stress specific gene expression patterns of monocot (Maize) and dicot (Soybean) were compared. These analyses confirmed that a species-specific gene expression pattern exists under water deficit conditions in root tissues.

[0122] Microarray studies were conducted in maize using the same seedling root experimental conditions as used in the soybean system described in Example 1. Based on the maize array results (root region specific and stress specific genes) and the results from other experiments and also from the reported gene information in the literature, a panel/subset of 273 genes were selected for further testing. In order to further characterize the gene expression under various time points of water deficit conditions in maize roots, high throughput qRT-PCR was utilized for more precise and sensitive data points. These 273 genes (listed in Table 17) were found to be differentially expressed in various root regions of maize at different stress time points (0, 3, 6, 12, 24, 48 hours of stress). The actual sequences of 224 genes out of these 273 obtained from the maize genome database are disclosed herein as SEQ ID. Nos. 1-224. The remaining 49 genes all have GenBank accession numbers whose sequences can be obtained for free from the GenBank database maintained by NCBI.

[0123] Because the root system of soybean and maize are similar, it is likely that soybean homologs of these genes also play some roles in stress avoidance mechanism by maintaining root growth under water deficit conditions. Soybean homologs of these 273 maize genes are identified by Blast searching and the sequences of some of these soybean homologs are disclosed herein as SEQ ID. Nos. 225-432.

[0124] A number of genes were found to show differential expression in root region R1 5 hours after being subjected to drought conditions in both soybean and maize. Examples of such genes include root specific protein RCc3, ionositol oxygenase, Lipoxygenase, among others. A number of such genes are listed in Table 18 showing sequence comparison between the drought response genes from soybean and their counterparts from maize.

[0125] At least 30 common genes show differential expression in root region R25 hours after being subjected to drought conditions in both soybean and maize. Examples of such genes include bZip, DREB, ACC oxi, CDPK, etc. Table 19 lists some of these genes from both soybean and maize and the sequence similarity between the soybean genes and their respective maize counterparts.

[0126] At least 18 genes show differential expression in root region R1 after 48 hours under drought conditions in both soybean and maize. Examples of such genes include put. NAC, CCAAT, put. Myb, GST, etc. Table 20 lists some of these genes from both soybean and maize and the sequence similarity between the soybean genes and their respective maize counterparts.

[0127] At least 29 genes show differential expression in root region R2 after 48 hour under drought conditions in both soybean and maize. Examples of such genes include NAC, a-Galact, CCAAT, SAPK3, HSP20, etc. Table 21 lists some of these genes from both soybean and maize and the sequence similarity between the soybean genes and their respective maize counterparts.

[0128] As described above, microarray experiments were performed in maize and soybean seedling root system with substantially the same water deficit conditions and similar root segment size. Soybean genes differentially expressed under water deficit conditions were compared with the maize microarray results. Those soybean genes common between soybean and maize whose expression was found to be altered under water deficit conditions were identified. The sequences of these soybean genes are disclosed herein as SEQ ID. Nos. 433-480. Because these genes have homologs in both soybean and maize whose expression levels are altered in response to drought conditions, these genes are likely to encode proteins that play a role in drought response in a plant.

### Example 3

### Confirmation of Root Drought Response Genes and Creation of Transgenic Plants

[0129] The genes shown to be up-regulated or down-regulated were confirmed by comparing the expression levels of specific genes in the root regions under drought or normal conditions by using Northern blot or quantitative RT-PCR. Genes that have been confirmed were cloned and placed in different expression constructs so that they could be introduced into different host plant.

[0130] The genes found to be upregulated or downregulated in the root regions of soybean and/or maize may be altered in a host plant such as soybean or maize in order to generate genetically altered plants that are more resistant to water deficit conditions. Alternatively, one or more of these genes may be introduced into a host plant and forced to be expressed at an elevated level or at a specific location in order to create a genetically altered plant that is more tolerant to water deficit conditions.

[0131] Table 22 shows the names of the genes that have been confirmed and selected to be introduced into a host plant, such as Arabidopsis, soybean and maize in order to obtain transgenic plants that are more tolerant to drought conditions than the non-transgenic host plant. The sequences of most of the genes listed in Table 22 are also disclosed as SEQ ID Nos. 481-510. Other sequences can be obtained from the GenBank database or various soybean, maize and arabidopsis databases. The promoters used for most of the constructs are also disclosed in Table 22.

[0132] While the foregoing instrumentalities have been described in some detail for purposes of clarity and understanding, it will be clear to one skilled in the art from a reading of this disclosure that various changes in form and detail can be made without departing from the true scope of the invention. For example, all the techniques and apparatus described above may be used in various combinations. All publications, patents, patent applications, or other documents cited in this application are incorporated by reference in their entirety for all purposes to the same extent as if each individual publication, patent, patent application, or other document were individually indicated to be incorporated by reference for all purposes.

### REFERENCES

[0133] In addition to those references that are cited in full in the text, additional information for those abbreviated citations is listed below. The content of all patents, patent applications or other publications cited in this disclosure are incorporated by reference into this disclosure.
[0134] Boyer, J S, 1983, Environmental stress and crop yields. In C. D. Raper and P. J. Kramer (ed) Crop reactions to water and temperature stresses In humid, temperature climates. Westview press, Boulder, Colo. pp 3-7.
[0135] Muchow R C, Sinclair T R. 1988. Water and nitrogen limitations In soybean grain production. II. Field and model analyses. Field Crop Res. 15:143-158.
[0136] Specht J E, Hume D J, Kumind S V. 1999. Soybean yield potential-A genetic physiological perspective. Crop Science 39:1560-1570.
[0137] Neumann P M: Coping mechanisms for crop plants in drought-prone environments. Ann Bot 2008, 101:901-907.
[0138] Wang W, Vinocur B, Altman A: Plant responses to drought, salinity and extreme temperatures: towards genetic engineering for stress tolerance. Planta 2003, 218:1-14.
[0139] Vinocur, B, Altman A: Recent advances in engineering plant tolerance to abiotic stress: achievements and limitations. Curr Opin Biotech 2005, 16:123-32.
[0140] Chaves M M, Oliveire M M: Mechanisms underlying plant resilience to water deficits: prospects for water-saving agriculture. J Exp Bot 2004, 55; 2365-2384.
[0141] Shinozaki K, Yamaguchi-Shinozaki K, Seki M: Regulatory network of gene expression in the drought and cold stress responses. Curr Opin Plant Biol 2003, 6:410-417.
[0142] Schena M, Shalon D, Davis R W, Brown P O (1995) Quantitative monitoring of gene expression patterns with a complementary DNA microarray. Science 270: 467-470
[0143] Shalon D, Smith S, Brown P (1990) A DNA microarray system for analyzing complex DNA samples using two-color fluorescent probe hybridization. Genome Res. 8: 639-645.
[0144] Bray E A: Genes commonly regulated by water-deficit stress in Arabidopsis thaliana. J Exp Bot 2004, 55:2331-2341.
[0145] Denby K, Gehring C: Engineering drought and salinity tolerance in plants: lessons from genome-wide expression profiling In Arabidopsis. Trends in Plant Sci 2005, 23547-552.
[0146] Shinozaki K, Yamaguchi-Shinozaki K: Molecular responses to drought and cold stress. Curr Opin Biotech 1996, 7:181-167
[0147] Shinozaki. K. and Yamaguchi-Shinozaki, K: Molecular responses to dehydration and low temperature; differences and cross-talk between two stress signaling pathways. Curr Opin Plant Biol 2000, 3:217-223.
[0148] Seki M, Narusaka M, Abe H, Kasuga M, Yamaguchi-Shinozaki K, Carninci P, Hayashizaki Y, Shinozaki K: Monitoring the expression pattern of 1300 Arabidopsis genes under drought and cold stresses by using a full-length cDNA microarray. Plant Cell 2001, 13:61-72.
[0149] Fowler S, Thomashow M F: Arabidopsis transcriptome profiling indicates that multiple regulatory pathways are activated during cold acclimation In addition to the CBF cold response pathway, Plant Cell 2002, 14:1875-1690.
[0150] Maruyama K, Sakuma Y, Kasuga M, Ito Y, Seki M, Goda H, Shimada Y, Yoshida S, Shinozaki K, Yamaguchi-Shinozaki K: Identification of cold-inducible downstream genes of the Arabidopsis DREB1A/CBF3 transcriptional factor using two microarray systems. Plant J 2004, 38:982-993.
[0151] Yamaguchi M, Valliyodan B, Zhang J, LeNoble M E, Yu O, Nguyen H T, Sharp R E Proteomic analysis of the differential responses of elongation rate to water stress within the soybean primary root growth zone. Plant, Cell & Environment 2009. [Epub ahead of print]

Lengthy table referenced here
US20110119792A1-20110519-T00001
Please refer to the end of the specification for access instructions.

Lengthy table referenced here
US20110119792A1-20110519-T00002
Please refer to the end of the specification for access instructions.

Lengthy table referenced here
US20110119792A1-20110519-T00003
Please refer to the end of the specification for access instructions.

Lengthy table referenced here
US20110119792A1-20110519-T00004
Please refer to the end of the specification for access instructions.

Lengthy table referenced here
US20110119792A1-20110519-T00005
Please refer to the end of the specification for access instructions.

Lengthy table referenced here
US20110119792A1-20110519-T00006
Please refer to the end of the specification for access instructions.

Lengthy table referenced here
US20110119792A1-20110519-T00007
Please refer to the end of the specification for access instructions.

Lengthy table referenced here
US20110119792A1-20110519-T00008
Please refer to the end of the specification for access instructions.

Lengthy table referenced here
US20110119792A1-20110519-T00009
Please refer to the end of the specification for access instructions.

Lengthy table referenced here
US20110119792A1-20110519-T00010
Please refer to the end of the specification for access instructions.

Lengthy table referenced here
US20110119792A1-20110519-T00011
Please refer to the end of the specification for access instructions.

Lengthy table referenced here
US20110119792A1-20110519-T00012
Please refer to the end of the specification for access instructions.

Lengthy table referenced here
US20110119792A1-20110519-T00013
Please refer to the end of the specification for access instructions.

Lengthy table referenced here
US20110119792A1-20110519-T00014
Please refer to the end of the specification for access instructions.

Lengthy table referenced here
US20110119792A1-20110519-T00015
Please refer to the end of the specification for access instructions.

Lengthy table referenced here
US20110119792A1-20110519-T00016
Please refer to the end of the specification for access instructions.

Lengthy table referenced here
US20110119792A1-20110519-T00017
Please refer to the end of the specification for access instructions.

Lengthy table referenced here
US20110119792A1-20110519-T00018
Please refer to the end of the specification for access instructions.

Lengthy table referenced here
US20110119792A1-20110519-T00019
Please refer to the end of the specification for access instructions.

Lengthy table referenced here
US20110119792A1-20110519-T00020
Please refer to the end of the specification for access instructions.

Lengthy table referenced here
US20110119792A1-20110519-T00021
Please refer to the end of the specification for access instructions.

Lengthy table referenced here
US20110119792A1-20110519-T00022
Please refer to the end of the specification for access instructions.

LENGTHY TABLES
The patent application contains a lengthy table section. A copy of the table is available in electronic form from the USPTO web site (http://seqdata.uspto.gov/?pageRequest=docDetail&DocID=US20110119792A1). An electronic copy of the table will also be available from the USPTO upon request and payment of the fee set forth in 37 CFR 1.19(b)(3).

We claim:

1. A method for generating a transgenic plant from a host plant, said transgenic plant being more tolerant to drought condition when compared to the host plant, said method comprising the steps of:
(a) introducing into a plant cell a construct comprising a Root Specific Drought Response Gene (RSDRG) or a fragment thereof, said RSDRG or fragment thereof encoding a polypeptide; and
(b) generating a transgenic plant expressing said polypeptide.

2. The method of claim 1, wherein said RSDRG or fragment thereof is derived from a plant that is genetically different from the host plant.

3. The method of claim 1, wherein said RSDRG or fragment thereof is derived from the host plant.

4. The method of claim 1, wherein said RSDRG or fragment thereof is derived from a plant that belongs to the same species as the host plant.

5. The method of claim 1, wherein the RSDRG or fragment thereof comprises a sequence selected from the group consisting of the sequences from SEQ ID. No. 1 to SEQ ID. No. 510.

6. The method of claim 1, wherein the coding sequence of said RSDRG or fragment thereof is operably linked to a promoter for regulating expression of said polypeptide.

7. The method of claim 6, wherein the promoter is derived from another gene that is different from said RSDRG.

8. A method for generating a transgenic plant from a host plant, said transgenic plant being more tolerant to drought condition when compared to the host plant, said method comprising the steps of:
(a) introducing into a plant cell a construct comprising a DNA sequence encoding a first polypeptide that is at least 90% identical to a second polypeptide encoded by a Root Specific Drought Response Gene (RSDRG); and
(b) generating a transgenic plant expressing said first polypeptide.

9. The method of claim 8, wherein the RSDRG comprises a sequence selected from the group consisting of the sequences from SEQ ID. No. 1 to SEQ ID. No. 510.

10. The method of claim 8, wherein the coding region of said DNA sequence is operably linked to a promoter for regulating expression of said first polypeptide.

11. The method of claim 10, wherein the promoter is at least one member selected from the group consisting of a cell-specific promoter, a tissue specific promoter, an organ specific promoter, a constitutive promoter, and an inducible promoter.

12. The method according to claim 11, wherein at least a portion of said DNA sequence is oriented in an antisense direction relative to said promoter within said construct.

13. The method of claim 8, wherein the first polypeptide is at least 95% identical to said second polypeptide encoded by said RSDRG.

14. The method of claim 8, wherein the first polypeptide is at least 99% identical to said second polypeptide encoded by said RSDRG.

15. A method for generating a transgenic plant from a host plant, said transgenic plant being more tolerant to drought condition when compared to the host plant, said method comprising the steps of:
(a) introducing into a plant cell a construct comprising a DNA sequence selected from the group consisting of a soybean Root Specific Drought Response Gene (RSDRG) or a fragment thereof, and a homolog of a soybean Root Specific Drought Response Gene (RSDRG) or a fragment thereof; and
(b) generating a transgenic plant expressing a polypeptide encoded by said DNA sequence.

16. The method of claim 15, wherein the construct comprises a homolog of a soybean Root Specific Drought Response Gene (RSDRG) or a fragment thereof.

17. The method of claim 16, wherein the homolog is derived from a plant other than soybean, said homolog encoding a first polypeptide that is at least 90% identical to a second polypeptide encoded by said soybean Root Specific Drought Response Gene (RSDRG).

18. The method of claim 16, wherein the host plant is selected from the group consisting of soybean, corn, wheat, rice, and cotton.

19. A method for generating a transgenic plant from a host plant, said transgenic plant being more tolerant to drought condition when compared to the host plant, said method comprising a step of altering the expression levels of a protein encoded by a Root Specific Drought Response Gene (RSDRG) or a fragment thereof, said RSDRG being endogenous to the host plant.

20. The method of claim 19, wherein the expression levels of the protein are altered by modifying the transcription regulation of the RSDRG.

21. A transgenic plant generated from a host plant using the method of claim 1, claim 8, claim 15 or claim 19, said transgenic plant exhibiting increased tolerance to drought condition as compared to the host plant.

21. A transgenic plant generated from a host plant, said transgenic plant comprising a transgene, wherein the transgene comprises a Root Specific Drought Response Gene (RSDRG) or a fragment thereof, and said RSDRG or a fragment thereof is derived from a plant that is genetically different from the host plant.

22. The transgenic plant of claim 21, wherein the transgene comprises a sequence selected from the group consisting of sequences from SEQ ID. No. 1 to SEQ ID. No. 510.

23. The transgenic plant of claim 21, wherein the coding regions of the transgene is operably linked to a promoter for regulating expression of said transgene.

24. The transgenic plant of claim 23, wherein the promoter is at least one member selected from the group consisting of a cell-specific promoter, a tissue specific promoter, an organ specific promoter, a constitutive promoter, and an inducible promoter.

25. A transgenic plant generated from a host plant, said transgenic plant comprising a Root Specific Drought Response Gene (RSDRG) or a fragment thereof encoding a polypeptide, wherein the RSDRG is derived from a plant that belongs to the same species as the host plant, and the expression levels the polypeptide encoded by said RSDRG is altered such that the expression levels of said polypeptide in the transgenic plant is at least 50% higher or lower than the expression levels of said polypeptide in the host plant.

26. The transgenic plant of claim 25, wherein the host plant is selected from the group consisting of soybean, corn, wheat, rice, and cotton.

The application's sequence listing, which the Patent Office published only in electronic form, follows.

SEQUENCE LISTING (510 sequences)

SEQ ID NO: 1 - DNA, 1258 bp, Zea mays
tcatgaacgcgtgcccgcccagaacggtctcgatgggccggaggtacctggacgccgccgcccgtcccggcggcgccggcgccggcgacaccagctcgtgctcctgcttgcacgacctgcccatgtactgcaggatctggtccagcgcctcgtcgctggaggagtactgcaggcctccatggtgctggtgctggtgcgccgcagccgcagccgcagccgatgccttgccggcgccgccgtgcccatgctcgctgttactgctgccgtgcttgttgcccccgcccccacctgactccttgtggtggtgcttcttcttgaacaccctgcacaccacccatccgtcctcctgcccgccgtccgacgacgcggcggcagcagcagcagccgtggcggctgcgtcgtcgttggccacggcatcaccggatccagcagcatcagcagcagcggggtcgtcgaggcggtactcgtgcatgatccagtcggacttctggccgtgcggcgcgcggcccttgtagaagacgagcgtcttgcgcatgccgatgcgcttgacggcgttgtagatggccttgtcgcggccggtggccttccagaacccggcggccgtggcgcggttggtgcgcgtcccccgtcgggtacttcttgtccttgtggctgaagaagtaccagtcgttctggggacccgacccgatcttgcatttctcttggatgtcccatggctcgagcttgttgaggtcgacgtcgcggatgacgtcgaggtcgatctcctgggaggccaccttcttgcggaggtagtagttgagcagctcctcctccgtggggtggaagcggaaccccggcggcacgcacgactgcccgttcaccgagatgctcattgatgatcctccttctccttccttggcttctgcagcttccttgcctgcctgctctccttgccttttctcttgttaatttccttcccctgcgcggtgtgctggtgatatgcacagaggccagctgcgcgtacaagagcagctctggctagcaggacggtggaggaccagaggccagaggatgtgaggggaggaagacgatgatgaggaaagagaagagctaggagggaagctggtggtggcaggggaggaaaggcgctgcacttatatatagtggggggttgggggtacttttgcgaggcaaggccgacgacggcagctagcacacacaggcatggatccgagtgaaattagggggtgaggggggaggggatcgcgttcgattcgat

SEQ ID NO: 2 - DNA, 1101 bp, Zea mays
atgcatccaggaggtggaccactgtcggtgccaccaggcttccgcttccacccgaccgacgaggagctcctctactactacctgaggaagaaggtttcctatgagcccatagatcttgatgtcataagggagattgatctcaaccagcttgagccatgggatctcaaagaaaggtgcaggataggcaccgggcatcagaacgagtggtacttcttcagccacaaggacaagaagtacccgacgggaacaaggacgaaccgcgccacgacggcggggttctggaaggcgactgggcgagacaaggccatcttcctcggcaacgcctccaggaggatcggcttgaggaagaccctggtgttctacatcggcagggcgccacacggcaagaagactgactggatcatgcacgagtaccgcctggaccaagagaacgttgagattcaggaagatggttgggtggtgtgtagggttttcaagaagaagagctatcaccagagaggcctcaatccggctgaaatggccgccgcactggacgacgacgagctccagcctttccctgttcctatccccggcagctccctgcagccaacagagcacaagaccaaccctactcacctcatgcaatatgactatccttccttcgacccttccatgcagctcccacagctgatgagcgatgaccaggaacaggaacagcccgtgcggccaaccctcctccccggccatcccggcgttgctatggcctccatgagctcactcaacattgagtgctcgcagaacctgacgaagctcacatctaacggcagcgacgagatgctccacgtcggccacggcggtggggctggaggtggtgtagtcgtcgaccgcttcgctggcacgacgacagattggtcgatcctagacaagctcctcgcctcgcaccagaacctcgaccggctcttccacggcaaggtcgtcaccacggcatctgcctccccaatggcggtaccggtataccatcagcagctcatggaactcggtggctcgtcgtcgtccttgcagaggcttccactgcagtacctcggcggcgagacggccgatctcctcaggtaccccaagtaa

SEQ ID NO: 3 - DNA, 574 bp, Zea mays
gaattccattgtgttgggcaagaagtcgtcgtcgtcggcagcaggtgggaaggccagggctgggcgtggggctgccactgatccgcaaagcctctacgccaggaaaaggagagagcggatcaatgagcgtctgaaagtactgcagactcttgttcccaatggaaccaaggtagatatcagcacgatgcttgaagaggcagctcaatacgtcaagttcttgcagctccagatcaagcttttgagctcggatgatatgtggatgttcgctccgatcgcctacaacggggtcaacgttggcctcgacctcaagatctctccaccgcaacaatgatctacgccgatgtgaagatgcatggccgatgttcattgtcaatgcacatcgtgcatatgatcatacaaactacgtgtgaagtttgaaataggagattgaatggaagataatagagggcatgtttgtaatctgtccagattttattaaacaagttggattatataatctaaatggattataatctaaaataaacaggtcagtacgagtaagatgctggagacagccttacttccgctttatttt

SEQ ID NO: 4 - DNA, 526 bp, Zea mays
cgtacccaaccgtatcgatatcaggcggcacaaaatctgcaattccagtgtagcaggtgtaacctgaataggtggcatctgagtgcccgaatagtgtcttcctcacctttgaccatattccatcggcaccaaccaaaaggtcaccttcaaatatcctaccgtcctccaatatggcagtaaccttactgccatcatctgtaaaatcgactacatggcttccattcaatatagcgtcatcgccaactgctcgagcaaggatctgttgcagcgtcatgcggctaatgacccttgtgaccgggagcccccgctcagctgcaggagtaaacgtatcaaacttgatgtaccaggagccggacatgccatcgacgaggccattgatacggtcgccggtgacgcagccgacgcgcatgacctcctcggcgacggacatgtcgatggcctccagcgcagccagcgcgttgctctggatctggatgggtccgcggtactggccctccccgcgcaccgcgctcaggtcgcgctcgaa

SEQ ID NO: 5 - DNA, 606 bp, Zea mays
gtgggcacggctgttgtcactggcatgaatggccgattggccatggggaggctcggttctctctgtgaacaggtgaagcaactgaattttcaagggtatgaggtgattctggtaacctcaggagctggtgggggtgggaggcagaggctccaataccgtaaacttatccatgggagcttcgcagatctgcaaaatcctcagatgaactttgatggaaaggcatgtgctgctgttggtcaaagtgtcctgatggcgatctatgacacattatttagccaacttgatgtaacgtcatctcaacttcttgtgacggatcgtgatttcaaggatccaagttttggggaccagctccgtgagactgttttttcactgttagatcttaaagtagtacccttatttaatgagaatgatgccatcagtacccggagacagccatatgaggattcatctggtatattctgggataatgacagtctagcagctctgttggcagcagaacttaatgctgatcttcttatcatgcttagtgatgtggaaggactctatagtggtccaccaagcgatcctcagtcaaagatatccacacatatgtcaatgaaaagcatg

SEQ ID NO: 6 - DNA, 635 bp, Zea mays
ataagcacgagtgcaaagcaagatgacgattgagtcctccgaagagattggctagaccttctgaaactacccaaaattaacagcacatcaggataacttacaacgctaactttacttaccctgacctgccattaccagcttccagaaaggcacacgcgtgcatgcacgggttaattgtgcagaatcgaaccagaacctgagctgagcacgtcgaaacacgacaacgatgacaaaataactctaacctagacttgggatcttctagctagctaaccccctatcactatagccactagcttctgccctcgtcgtcaccccatgccgttgttgaaaggagagctccagttgttagcgtacccgttcgccctcgcgatgctcaccgtggatcccgagccctgcgagaactggtacccgttcctcgccgcagcgtacgggtctccaccagctgcggtcgccaccatggcggcgtcgtaaccgatgagcttcccctcctggtggtcgtccccgtagctgcacgtgctcccctggttggccgcgctgctgtgcccctggtcggccgccgccgccacgacagggctcgacggcatgaggaaggagctgccaccaccgaggccctggtacccaccactggcgcc

SEQ ID NO: 7 - DNA, 327 bp, Zea mays
ttggatatgccattccttttataatgtgtgcagcaatatgctgctgctttccatgcttgatttctgttttgcgtcttcaagaagatttgggtcaaaatagaggagctactcaagagctaatagatgcattgccaacctacaaattcaaaccaaaacgtgtcaaaaactgggggattgaccatgcttcaagctcagagcatcttgatgagggtggcattctcggcccaggaactaagaaggaaagagttgtttcagctgaagatgctgtgagtatatttcacgtccttttgctgtgtaattgaagggtttgctttagtgatattcttt

SEQ ID NO: 8 - DNA, 552 bp, Zea mays
ttggccaaggcccacggcgcttctctcgcgcaccttagcctggagggatgcagcaagatcactgacgcgagcctgttcgccatctccgagagctgcagccagcttgccgagcttgacctttccaactgcatggtgagcgactacggtgtcgcggtcctggcagcggcgaggcagctcaagctgcgtgtcctctcgctgtctggctgtatgaaggtgacgcagaagagcgttcctttcttgggcagcatgtcttcatccttggaggcgctgaatctccagttcaacttcatcggtaaccacaacatcgcttccttggagaagcagctctggcggtgcgacatccttgcttagagggaacaagggcgacatctccgtagcggtagcatatacttaagtctaatcctcgttagttgagttgagtctggtttctggctcgtgtttgtgtcttggtggggggtctctcccgtttgtcttagggccggctgttttccgaggggcgtatttttttgccgaggctcggttttttttttgcaggtatcctcctgtgctgtg

SEQ ID NO: 9 - DNA, 465 bp, Zea mays
acgagactgagtctgctgccgttggaactcgtggcttcaatacttcaaagcataagaagtatggttcagtaggactcctggctccaaacatgcatgcaagaattgttcatgtggaaactggttgctccttgcctccaggctcttgtggggagctctggctccatggtccagctataatgaaaggttacttgaatcatgttgatccatgcgcaataaatggtggctggctgcgaactggtgacattgcctacttcgatttcgatgggtacttgtatatagtgggccgcttgaaagaggtgatcaagtacaagggatttcagatagctccagctgacttggaagcagttttgatcgaacaccctggaattgttgatgtggctgtgacgtctactgaggatgaagaagctggagaggtaccagtagccttcgtggtgaggaaatctggaagtggcctatcgtgcacgc

SEQ ID NO: 10 - DNA, 683 bp, Zea mays
aatacttgaaaacaaacgatatatatattatcttcgatcttagtatcttataggtatgtgcccgtgcattgcaacaaaacataaatttacataaattaacgagcctctaatggctcaaagctctagtgacaggcgatgcgagcgcaatggtaatggaaaccctcatggggaacagtgtcttgcaaaggagcgcgagtccgagtgagccaccacttgacgccttgagctccatcgtcctgttgtgaggatgcatttgccacgagctccctcggcacaagcttttggaagaacaaggcgccctatgcggcctgcatcactcgcactcaggaccttctcgaacaatggaacgatctccagatatttgttgcagctcttggtctgttattcttggccaataccgaggaagtaattgattgcgaccccttccttcagcaggtggtctagcaacacgaagatgcggaaacatgtctctagttggatcaaaagttgcaccctcaccaacccttggtggtctggtcgggaaatgccgagccctttgtggggggacagtgcagtggcaagatctcttccttcagcaatggctgtcgttggcgatagcataggtctttccgctgttgaagtagcctccatcctgtttccattgtttgcaatacctaggttcatgctcagacatgcctctggaa

SEQ ID NO: 11 - DNA, 943 bp, Zea mays
  misc_feature (27)..(27): n is a, c, g, or t
  misc_feature (29)..(29): n is a, c, g, or t
  misc_feature (33)..(33): n is a, c, g, or t
gcgtattgcttcgtcaatgtacatgtncntcancctttcagcagttaatgttcgccgatatgcatcgagatctgcttcagtgaatgtggccctagactttgaactatatgcagacactcggacagtcggactccacagctggttctgaattatatgcatcaacttggcggcagcggtacaagaccggatagatggaggctgacagcttcgtgattgacctgctagctgtacctgtacagcgcctagcctaggcatatctagcagcgccgccgaaccagcatctcaccgctacacgagcaggtcggtatcatccttcgtggcaatgtcggttgcgccggtgcaagccgcggcggcggcctccttgtgctcctcctcctccatggtgtccgacatgctccgccccctcgtctcggggaggcaggcggcaaagagccccaaacatccgatgcagagcccgaacacgccgaaggaccaaaagctccgttcgcggccgaacgcgacgagcacaggtgccaccacgccgcccagcaccagcgcctgccgcaccagccccaccgcaaagttgcgcacggacgtcgggaacagctcgatggagtagatcaggatgaggttgaacgccgtgatggtcgagaagaaggagagcaactcggccgccattcgcgccgccgagccctctgggatgacgacgcacgcgagactgaaggcacctgccgccacagtaagcgcgacgacagagctccgccggttgaccctgccgatgaagatcaacgacaggatggccgacggcagctcggctaaagcgttgtacgtgacgctcaggtacaggttggttcccaggctgccgacgttgagcggcatgccgtagtagaccatgccgacgccgaagctggcggtcatgatcgccgccagcctccgcagcgcccacggccgctcccacatcgcc

SEQ ID NO: 12 - DNA, 1140 bp, Zea mays
atgagcatctcggtgaacgggcagtcgtgcgtgccgccggggttccggttccaccccacggaggaggagctgctcaactactacctccgcaagaaggtggcctcccagcagatcgacctcgatgtcatccgcgacgtcgacctcaacaagctcgagccatgggacatccaagagagatgcaagatcgggtcgggtccccagaacgactggtacttcttcagccacaaggacaagaagtacccgacggggacgcgcaccaaccgcgctacggccgccggcttctggaaggccaccggccgcgacaaggccatctacagcgccgtcaggcgcatgggcatgcgcaagacgctcgtcttctaccggggccgcgcgccgcacggccacaagtccgactggatcatgcacgagtatcgcctggacgaccctgacgccgccgccgtcgccgccacggtagccgctgctgccgcgtcgtccgacggcgggcaggaggacggctgggtggtgtgcagggtgttccagaagaagcaccaccacaaagagtcgtcaggcagatgccgcagcaagcgcggcagtaaaaccgaacacgggcacygcgaggccaagacggcggcgcaccaacgccacggctgcggcctgcagtactcctccaacgacgacacgctggaccatatgctgggcaggcggtcctgcaaacaggagcacgagctgctgccgctgccgccgccggcggctgcgcgggcggcgtccaggtacatccggcccatcgagaccgtgctgggcgggcacgggttcatgaagctgcccccgctcgagagcccggcggcggcggaggcgctgacgacgccgcacgccgtctctgcaggcgacgccaccgccgccggggccctcgacggcctccaccgcgccgggaacgggatcacggactgggtcatgatggaccggatggtggcgttgcacctcaacgggcaggcacccgccgcggaccagctcggcagctgcttcgacgccagcgcggacggcggcggcctcgcctgcttctactccgctgccgccaacaggctgctcggcggcggcgacgacgacctgtggagcttcacgcgatcgtcgtcgacggagcggctgggccatgtgtcgctttag

SEQ ID NO: 13 - DNA, 487 bp, Zea mays
  misc_feature (476)..(477): n is a, c, g, or t
gcacgagggacgacgggtacaactggcgcaagtacgggcagaagcagatgaaggggagcgagaacccgcggagctactacaagtgcagcttcccgggctgccccaccaagaagaaggtggagcagtcgcgggtttttttagttcacggagatcgtgtacaagggcacgcacaaccacccgaagccgcagagcacgcgccggggcgccagctcggcgccggcgtcgtcggcgtcgtacgtggtgcagagcgccagcgacgcggtgatgcccgagcattcctggggcgcgctgtccggaacacccgtggtgacgccggagaactcgtccgggtccttcggcggcgacggcgacgaggtcaacggcatgagctcgcggctgggcggtagcttcggcgccgacgatctcgacgacgatgaacccgactccaagagatggaggaaagacggtggcgacgccgacgcagcagggtgcctcgnngtgtcggtgg

SEQ ID NO: 14 - DNA, 598 bp, Zea mays
gtgaatgccttaagccattccggtagagagatcatacacccgataatatcatctagttagcttgactagactcttggatgcctttgtacaccaaaatacgatacaccaaaatacgacaaacaaacggcacaatgtatgttataccccgctatcttcagggctcaggctatcagtttcatgaacgtacccccgaccccgagccacacaagcaaaacaaccagcatttcagatagcactgtcagttcgcagcagagttggccagctgcacgagaccgtccacgatttccagcttgctgccaagctgcaccttctgctcccccgggtcaccgcaggggcagggccagtacaagctgggctccccgaaccccaagttgttgtagctcggcagagcctgagctagtgagtgctgcgacggcagcggctgcaggaggttggtgaggaaatacggtggcaagctgttgctcgactgctgggactgggagaacgaacgagcgctcagagcggcctggtcttctgcctccggagctggcttctgaatcagcttcctccccaggatggggatgtctcgttgagcgatcgctagcaggttgtaccggct

SEQ ID NO: 15 - DNA, 887 bp, Zea mays
gaattccattgtgtcgggccagttccaatccgtgctccgctaggtcaatcgaagagtccaaagatcccagctttcccatcccatggcgggcggcgacctcacgcctcctcctcctccacctcctcctcccgaagagacgccgccggcagcggcggccgaggacctgatcgagatcgtggaggaagggtcggggcggctggacatcgcgcggtacgtggaccacgtgcgcgacctgtcggcgggcgccatcgcgacgttcgagggcacgacgcgggaccacttcgcggggcggcgcgtggtggagctccggtacgaggcgtacgcggccatggcgcggcgccgcctggcggccatactgcgggaggcccggtcgcggcacgcgctgcggcggctggccgtggcgcaccgcctgggcgccgtccccgccggcgaggccagcgtgttcgtcgccgcctccgccacgcaccgcgccgacgccatggaggcctgccgctacgtcatcgacgagctcaaggcgtccgtgcccatctggaagaaggaggtgtacgacgacggcgaggtctggaaggagaaccgcgagttcctggaccgccactccgccgacggcgatggccacggctcggcgacggcgggcgggtgctgcgggagcaaggtcagggtccaggaggcttgacgctgatggatggcggcgcccggatccctctctcgctccatcgcggtcgcgactcgtgacccattggagcagggggttcatgaaattctatgtactacttactcgatctccgttgattttgttctccatcttttttctttctttctgagagagactgctgcttgtacttgcacaccatgaagatgaaaggcaaatagatgcgctgataaaagtc

SEQ ID NO: 16 - DNA, 982 bp, Zea mays
ctcacaacaatatttaacaatatctcatgtttttagctagactttcaatgcttagtttcatgaagtgcggtcaaagcagtaagcactggttcaatacagttccaaagtgatagcataggctcaagaaaaacgcaaatggatgccacatgatttagcactaaagaataaggcaaagatgcaaccaagaaaacaacagcgctacaaaaagaaaggttgcctattatattatataagaacacagtattcagcacatgtttaggtgtatagcaatggttgagtaactaaacaaaaaaaaccaggacatgttccttccacgcttgacttctccctgctcatctgcacagcaaggtggccaacgagcggctcgttggcgccggcgcggccatggtggaggtggatctgcacacccacgagtcgtgggagctccctggtacgtgcttgctgtgcctgcttgccactgaaattgaattccttaattgcttaatttacttgattgttagctctgsgtccatctccctctctcgcaagcaagactctggctaattaactcagttccgtgtcatggaatgagtgattaggcacgcaaccgcgccaccaagtccggctactggaaggccaccgacaaggaccacgtgatccacaccccctgcagctggcccgccgccgccgccggccaccaccgcaccgtcgtcggcatgtacaagaccctcgtcttctaccgcggccgcgcccccaacggcgtcaagaccagctgggtgatgcacgagttccggatggagaacccgcacaccccgcccaaggaggactgggtcctgtgcagggtcttctacaagaagaaggcagacgccatggattatgccgactgcagcgaccaggacgccatcgccgtgcatatccttgcggcagcgctgacccacgaggggcggcagtagcagcgtcggaccgaggagvgagacaacagggtgggggagaggcaccaacc

SEQ ID NO: 17 - DNA, 344 bp, Zea mays
gatcaacaacctttaacccctgggagaggatttggaaggcttgggcgcctggtaaatgcaagttcttcatgtggcttgtggctcatggtcgctgctggacagctgaccgtktggcaagaaagrvgctgcytcaccctcaactctgtccgttgtgtgatcaggaggaggagaccctcaaccatctactagtttcctgcgtcttctcacgtgatgtttggttycagattctgaagattgtccggttgcagcatcttgctcctamccttgcgacctcttcctttgaggattggtgggaaggagttgtcacggtcccgsgtgatccaahatataagvsactgttaaag

SEQ ID NO: 18 - DNA, 671 bp, Zea mays
  misc_feature (654)..(654): n is a, c, g, or t
gggtcttgcgcacgccgacgacggcgcggtggtggctgccgccggcggcgggcctgctgcagggggtgtggatcacgcggtccttgccggtggccttccagtagccggacttggtggcgcggttggtgcgcagccccgtggcgtacttgcggtcgcggaagctgaagaagtaccactcgttcgtgcttttttcgccacgtcagggagctcccacggctcgtgggtgtgcagatccacctccaccatggccgcgccggcgccggcgagccgctcgttggccaccttgccgtgcaggtagtggcacaccagctcctcgtcgctggggtagaaccggaaccccggcggcagcgtcagctcgatgtcgcgcagccccatggctagctcctgctcctgctccagctactactgctagctagctgccaccttattatttcctatctatctatatttctatctgttcacaggaatctttatgtaaggactaaggagctggatatggaagaactatatgtatatatgagacaaagggacctatatatgcacgtcgatctgaagaggagagagagggggaggggacagacgagctaggactaggagtagcaaggaattggctgcactgcacacatctacgacgactgatctgagagctatggnttgtttgcttgcttgct

SEQ ID NO: 19 - DNA, 690 bp, Zea mays
agcttataaagtgacaatcacagacaatctatctgcgcctataaggctttggattaatggcggtgtgaacaagggcgactctggccaccgtgtgtccatcttccccctactatacacactcctccttcacgagcgatactgctaggtacaggtccacgagcttaccacagacctgccaacgtcctccgcagacaaattctctttatcgtgggtccgacttgccgtctcattctctccaggacctcattcttttgcttctccagcatttcgacctgtttttttgcaactcatcgttcaactctttaagttttgccacctcagcttccaactccatcatatacgcctgtttcctcccacgcgacctcgcggccaactcccggttcttgatcatccggcgttgcctcctctcaaccaccttctccacagctggtggcttccttcccctcaaaccagcacaaaaaaacgtacgacaccggtgatggcgacagatgcgacaagtcgtctccttccatcttcccgaacccgcttgccgtcaccggccgcggcgataccgccggggcctcaagaacacctccctgctgctgactgagagcccccgacacaaacccattcccgaattggagcggaggcactaagggagcaaacacattgccatgtggaaacagcattggcggttgcagatgaggtggt

SEQ ID NO: 20 - DNA, 593 bp, Zea mays
ccgagggatttatatgatttggtgcagttaatcagagccacatagagctaggtcacaggaaacttaggttgtgtatagcaatcggacacaagctcagttttccacttacaagttacaacacagcagctacacaagtgtgcacgagatggatgggctgcgcatatgctgtgttttggagctacggatccggtctcagatgcacgtgcctgtggacagaaaccgctgctctaggatgccagccagaccgctacctcttcaagcctcgttgtgtcgtcgtagctgtatcaagtcatcaggagggacacggtcactcttcttcgtgtttaggaagcgtccaccgttccctctcgccctcctcgtcatcgcgtgctgatgacggggactcgtgaagatacggctttcttgctttgaccagcgctttctctcaagctcggccttggcacgtgactgccgccgtcttagaatgccgcggtactgcttggcgttcacatagacaggctcctcggacacacatcttgacttccatagggagcaacaacgcctgcgtagtaagggtctgagtactgctatgctgcatgatattgatatgctgc

SEQ ID NO: 21 - DNA, 658 bp, Zea mays
gcggagatggtgaactgattaatatagcggagcatgcattgcataggactagaactaactcaccctatatattccattacatcttaaccatattctagcccaaataataattttgtggcgcctgcacatatacacacacctgtattcatatatataatacgtgcaagcatgcatgcatatatatgcttcgagtcacttggaagtcacttgaagcttgtgcaaaccttgggagattctaggagtggattccaatcccaaatcttttccatactaggaaaaggaagcaatggaccttgtgatggcaagggatggttagggtttccttggctactatatgatccgattgccctactcagctcatctattggaattgttgccattgtagccgagtttgcattaagcagggcatgtgtggaagaatgcaacatcggtgagttattagcacccttcatgaggtagagtgatgtaccgtcctcctccgtcgacgtggtggagctaagtgagggtgttgataggaacattgacgtctgaggcaccattgttactgctcgagctgcagctgatgatgttatggctatggcggtgtttgctccaccgtatggcttgttcatgtgagctgatgagtggccaccgtcgaacatcggcgccaggcggggcg

SEQ ID NO: 22 - DNA, 582 bp, Zea mays
aaagaccattttcgatcggacctataatataacatcagccaaactgcacggtcttaggttttggcgtcctttgttcacaccaaatatttatggatagacctcgatgactgacagggagccaacaacgggtagaattttgtagtctttaaatccagcttggatgaaaatcttcttccactcttgctcgtcgcgctcagccccattgaccatcatgataaacaaatcaaacaaaatttgtacctctagacgttttgtatttgactcatcatatccaactaccatgtccatgattattaccttccctccttcatagcatggagatatggcttgcctgcaattcttgaatattttgacacactcatcggcaccccagtcgtgtaaagccgtcttgaggaaaacagcggttgccggcggaatactctgaaacatgtcgcctgcgacgaactgcacgttgccatcggatggagccccggcgacgacgtgcgggaggtcaagcacgctgcacttgaggtgcgggaaggcagcggcgatggcggtggcggcgccaccatgcccaccgccaacgtcgaccaacgagtcgat

SEQ ID NO: 23 - DNA, 5120 bp, Zea mays
tttctagaagggaagaatgaagaaggaagcgcgtgggggtttttttttttaccttgatgcttttttaacctgtgttcagttgattggctgcgtctggttgctactcaacaaacaagaccacaagctaaaacttggtgatcggagactaccttttgcttgcttcgatgctatatttccttaatcttttgtggtgcatgctgttctgttcttcctatgtgtggcggctggtagttcgatgttcttgcgtcgtcgcccagccctaccagtctaccacgctcccggctgccatgttctcgtgtcgccatgcagccagccagccatcccccacaaagccagtaagccattggcattgcttgcacayaacagcttgctcctcttccaagccaaagccaataagaagccattgcattgcacacccacatgccacagaaacagcatgcagcaatcctgcttctctgaattgctttgacttctcctgggcctggccctagatatgtgtgtcgattcttccttgcaagcatcagctctcgtctctgcacatgcatgacctatctcttgacgcttgtccaacagcctcatgcacgcttctgcttgctgcttccgtgactggcggtgccgatcaacgatttccgaccagcaacaacgcacaaatcttcatccacatgcggacatgcgacgctatgtatatatatatatatacacaaacacagatccatgtcacgtacaagaccgatcaccaccaccagcagctgctacgttaattgtgtccatggggagctgcgcatccaagtcctgcgactggtgccgctggatgacgaggaaggcgcaggcgaccttgacgaggcgggggcagcgcacggcggcggtgcacccctggacgccgcccgaggtgccgccggccggtcagcgggtcaccgtgcgcatgcgggccagcgagttccgcgcgctgaccgccgccgccgtccgcagggacgcagcaggcgacgtcgccgcccgcctcatcctcgacgggtgcgccgccggccgctgggcgtggtcgccggcgccggagtagttcgtgagaacctacctgctgtgcgtgcgcgcgcgagtgcagagctgctgtctgtaattcgtgatggaaatcaaatgaactgtatatatactacttacgtacggccgccgcgcgcgtacatcatggcatgtcatgcatacgagttgaaacgttgtccatccgtccatggccgcagctcgtcggcgtcgctgtcagcgacatgaataggtgcatactgttccacgacggtcgacggccggccgggcgcgtgtggaatggagatacggatgcgacctgtttcataaagcctggcgacttttcggcacgccaggcgatcggacgacgaccatcgatccatccatcggtgctgccaccggcccaccgtcgtccgctcgtcgaccatcgatccagcatatattaatattattactgccgagtacggtgtagtccaaggtacacggatggatgccgttgtcagccaaaagggggccaccacccaaaaaatcacgtggaagcgaaggaaaagagccgaatttgaaaggaaaatagggcaatttcgcatgctccatgcaaaataaaaataaaacccggcccaaaccggtttgtgtaggtgagaaagtgttggttcaaaatacgttagattatatgatctagatatattgcaatcacaaacaaacatgcccttatcaacaagcaaatcaagcaataaaaggcccgattcagtggatcggcccataaaaaaagaaagaccgattgtcacctcctaagcaagtttttatgtgcctagaaagaaagaagaaacttgctcctactcctatggtccctatggtccgaggatgtcaaacaagcatatcgcattactggttctatatatatatagtactctctctccgttcttttttatttatcgtgttttagttttaaaataaactagggttgtttgttaatgaagttgaagaaccgattgtcatcgaggatatatatggttcaatcaatctgacccaagttcaccggagctttgtgtgtgggacccgcaagcgagatggacggcggagataggttgtgtggccagccactgagccacacacacacatgcggcagtgctttcccgatccctaattccctacgacgtacgtacgtacataagtaaggcgatcgacgacgaacggccgggcgtctgtctaaagcgacacatggcccagccgctccgtcgacgacgatcgcgtgaagctccacaggtcgtcgtcgccgccgccgagcagcctgttggcggcagcggagtagaagcaggcgaggccgccgccgtccgcgctggcgtcgaagcagctgccgagctggtccgcggcgggtgcctgcccgttgaggtgcaacgccaccatccggtccatcatgacccagtccgtgatcccgttcccggcgcggtggaggccgtcgagggccccggcggcggtggcgtcgcctgcagagacggcgtgcggcgtcgtcagcgcctccgccgccgccgggctctcgagcgggggcagcttcatgaacccgtgcccgcccagcacggtctcgatgggccggatgtacctggacgccgcccgcgcagccgccggcggcggcagcggcagcagctcgtgctcctgtttgcaggaccgcctgcccagcatatggtccagcgtgtcgtcgttggaggagtactgcaggccgcagccgtggcgttggtgcgccgccgtcttggcctcgcygtgcccgtgttcggttttactgccgcgcttgctgcggcatctgcctgacgactctttgtggtggtgcttcttctggaacaccctgcacaccacccagccgtcctcctgcccgccgtcggacgacgcggcagcagcggctacctgtccaacacgacatcgccagcggtgttaattgtatttgttgctacctttttaaggcacatgaagctagcacatggcaaagttcaataattagtactgcctccgtccctcctactgctctcctcatcgatcaatcaatcaaacaagagggtttttcttcatctcacgtctggagctggatcaaatcaaggcgggcagccgtacgtactcgtatgattgcaccaccgcctccgatccatggttccatccacacacatataattgtttattaatggtggcgtacgtgaattgttgcagagattagtaacgacacagacaattatattatctaccactaccaggggaactggggatggaagatctgatctgatcgagccggaggatgcatgcatgcagtgcaggcatgcttaccgtggcggcgacggcggcggcgtcagggtcgtccaggcgatactcgtgcatgatccagtcggacttgtggccgtgcggcgcgcggccccggtagaagacgagcgtcttgcgcatgcccatgcgcctgacggcgctgtagatggccttgtcgcggccggtggccttccagaagccggcggccgtagcgcggttggtgcgcgtccccgtcgggtacttcttgtccttgtggctgaagaagtaccagtcgttctggggacccgacccgatcttgcatctctctgcatgcacgcagaatcgataactaaccccgatgatcagcgccatggacgtacgatgatcagctcacgttcatgctcgtgtgacatgaccatcaggtcaccagctccgatccgatcctatgatcacgagctgatgctttgctcggacctcggagatggaaggtatatggtggtaagtataccgtaccttggatgtcccatggctcgagcttgttgaggtcgacgtcgcggatgacatcgaggtcgatctgctgggaggccaccttcttgcggaggtagtagttgagcagctcctcctccgtggggtggaaccggaaccccggcggcacgcacgactgcccgttcaccgagatgctcattgatgatacgatcttcaattccttcttagcttgcttgctttcttccttttttctagttagcagctagtgccagacctctagctagttagcaggatgatcgatcgaggacgagaggaagaagatgggaaggccagaggaggaagacgatgatgaggaatgagaagggaattgctggtggcagactggcaggggaggaaaggcgcgcgcttatatatagtacgtcatggtgggggttgggggggggggggggtattttttgctacccaataggcattttggcagcagacggatcgggcttgtccatggatccatctatgaatcatattgccatcatttcatttccagcggtcgtcagccagtgcatgcactgcagcagctagcccagagctgcgagcggcagggttggttttgccacccactcctgacagagacagaaagaggaaaggtggctgcatgcatgcatccttgctggtacgagcagtgatagcggtagaattaagagagagaaagggagaggacatgccaaggtagaggtatcaacgggtaattcttgggacaccccgtacccatctatatgaagttatatccatccccatatatatactcatcatggatataagaattgtccatacctatcctcattcgggtatcaggtcccaataaatccacatcctcaacaagaaatacatgatcaagttatattttatatgacattaacaaccataatacaaccaacaataatatatcacgaataaatctgacatttaataagaaaaaacattgtttagccattcagaacaagcaaaaacaaagtttagataggtgcttaaaggggttattggaagaggcagagttagatgttgggcttattgacttttgggttgcacacctaattttactgatgaattttccattcccatactcacatacccatccattgtggggaagaatttcacccaaatctttattaaaatctttctatatataccctaaccctaaccctaataaaatgaattctatatagattaacgggtatcgggtcccattgacacctctaaaacaaaagggtttcgttctttcctaccttcctcctccactcccatgcatgtgcactatattgtcgacacgacatatataggtatgaatatatgtagagtgattatatcgg

SEQ ID NO: 24 - DNA, 440 bp, Zea mays
gagagtaacactataataataataagctcaagactttttgctaccattacaaagtcaacggccatgctctgtttttttcccaatctgctctgtttcgttaatagaagcagcagtaacctttgtgcagttaccaaattgtggcacaggacacgacgagaacgagaaaaggtaaaaaccgaaagttcagcgaccactagtcctagcctagtagctccagagcggcaattcggaagccacgccgtcgtcgcataacgcggggacaatgggcggtggctccacgagcatcgcctgcgccaagttcgcgtagtacaggtcccagctcatgccaccgaacatgtccagctcgaacggcgagtcgtcgtcggtggtggtggccgaggaggactcgtcgccgtccttgttgttgggcgacgtccaggacgcggtcgagagcgcgttcc

SEQ ID NO: 25 - DNA, 535 bp, Zea mays
ggtaaatgaagtgcctttttcacgagaaatgaagaaaaaaaatataaggagagagtagtgcacgcgccgtacagataggacaaggagaactggagaagcaacagcaaaagacaggcttccatgagccacacaccacaacagtcagctcttggctctcgttctactcgcaactcgcgctcgccacccatttattgtaaaacaaaattctaatcacgcgtcggccgcgagcccctcgtcgccggcggcggtctcgagctggtctgctgagacgacgcgggcggcgttgcgcactgcgcagttgaggcggacctctccggcgttgcccgtgagcacgtccatctggctcatcttgaccatggacctggcgaactggtcgaagaaggcggcctggttgagcgccgaagcgcgtggcggcgcgtttggtggtctggtcgttgatgaggccctggtccgacttgaagagccccctgctttggcgatgaggtccgaagtagtacttgttgtcgaaggcgttgggggtgcgcccgtcccgcac

SEQ ID NO: 26 - DNA, 527 bp, Zea mays
tcatgctggcggacgaggacttgtccgagcgcaccgccgtgtacttctacctcgtcaaggccacggacggcagcctcaaaactttcttctgccaagacgagctcaggtcatccaaggcaaacgatctggttaagcgagtatacggaagcttggtccctgtgctagatggggagaatctctcggtcagaatactggttgaccactccatcgtggagagctttgcccagggcggacggacgtgcatcacgtcgcgcgtgcacccgacgcgggccatcaacgactccgcccgcgtgttcctcttcaacaatgccacgggtgtccacggtcaaggcgaaatccgtcaagatctggcagctcaactccgcctacatccgcccatacccagcaagttctctatgagctagcaaagtgaccgtaaccgacaaataggcagcagtattattgcatgcttgttaattacatgcatgggctcatttgtagaatagtgattgattaatttattcgttggctcttgtttgtaaaaaaac

SEQ ID NO: 27 - DNA, 1379 bp, Zea mays
cgttgctgtcggcagcagcacagcaccgtagttcttggcatcatcatcaattgaagagattatatcgatcggccatggtggagcctagtgtgaaatcgtcagatcagcatggtggtggaggagtcgacctgctgttcctgcctcctggcttcaggttccatcccaccgacgaggaggtcatcaccagctacctcctgcagaagctcctcaaccctagcttcgcgccgcacgccatcggggaggtggacctcaacaagtgcgaaccatgggatctcccaagcaaggcgaagatgggggaggaggattccaaggagtggtacttcttctgccgcaagggcatgaaatacccgacgggcacgcgcgcgaaccgcgccaccaaggagggatactggaaggcgacgggcaaggacagggagatcttcttcaagccagtagctgggcacgacgacgtcgaccgccgtgagcagctggtggggatgaagaagacgctggtgttctacacgggcagggctccaaggggcaccaagaccaactgggtgatgcacgagttccgcctcatcgagggcaagggcaagtactccaggcaccgcaccaccaacgacgacctactactacgcttcaaccccaaggatgaatgggtcgtgtgcaaggtgcaccacaaagggggccgacatgatgccagcgccgccaagaagggcggcggaggaggagggagggagaggagcagcaatactcgtccgccgccggaacgcccaacgtcagctccgtcgaggccggcggcggcggcgacgacgacgagttcctccttgactccgtgctgctggattactccagcagctgccacttcaactcctccggtcccaccgcttgcacctcatccagcaggagcaggagcatgccgccgccccgtcgtcacgcgccgccggcagaccagcagcaagcaataatggtgggagggagctactactacactagcttgcaccaccaccaccaggaaatggtcgcacccacgaggttcgccgccgccgctggtttgccgagtgcgtgtgcgtcggcggcgggcgccggagctgcgcagcgtagttcccagcagcatggtgtgctgcagcagcagaggcttcccgccgggaactacaactactacgacgacgggggaaactactacgctgcaggttaccgtacaagccagtactgatgctgctgagaatttcagtcgtgttagtagagagtacttgcttagcagttaactgttgtgcgtggcagttttgttggttgcttgatcgattcagtagttcgttatagtacgtctgctagctagggattccgtacgacgttttgcttgctttgctggtgaggatttttataatgttctctttgtt

SEQ ID NO: 28 - DNA, 425 bp, Zea mays
aaaaatcgtttaaatgtagcttttatgatggaggcgcgcgcgggcgccatggcatccattaagacagaaaacaacacgtacgaaacaacttgggaaacatcacagtccgggtacgagagaggacttttatttatgaaagaaagaaacttgctgattaaaacgattgggcctagctagctagctagccgatcttggggactttggcgacgttgtcggcgttgtcgacaaaaacccggacgcgcttgtcgttgaaatcagtggtgacgaaggagccgtcgggcaaaacgaccacctggacgtccgggcggtcggccaaaattttctgcttggccaccttggacgggagcccctccacctccggccacgactttttgctgcggctaccgctcatggccgccgatcgagacctgctatagctaaatcga

SEQ ID NO: 29 - DNA, 917 bp, Zea mays
  misc_feature (670)..(670): n is a, c, g, or t
  misc_feature (705)..(705): n is a, c, g, or t
  misc_feature (727)..(728): n is a, c, g, or t
  misc_feature (741)..(741): n is a, c, g, or t
  misc_feature (747)..(747): n is a, c, g, or t
  misc_feature (756)..(756): n is a, c, g, or t
  misc_feature (874)..(874): n is a, c, g, or t
  misc_feature (907)..(907): n is a, c, g, or t
cccgggctgcaggtctaagctcgcctctgcctacagccgccttccgatcgagctaccagtgcgtagctcaaaactcaaaacgagaagcaagaactcagtagcaatatatggcgaagtcttgcaccttactgttcggcacagtactggtcgtgctcttgcttctagtgagccccattgcttgctcccgcaagctcgccaagccaacaaacaagcacaggccgagacacaagccggcggcagtcagagcccgcagcaaccacactgccaccccctcggtgtccgacgcctacggctccggcggctggttgtccgccggcgcgacgtactacggcgcacccgatggagacggcagtgacggcggcgcgtgcggctaccagaccgccgtcggacagcgtcccttctcgtcgatgatcgccgccggtagcccgtcgctgttcaaggagggcaagggatgcggcgcttgctacgaggttaaatgcgacagcaacgctgcatgctccggcaagccggcgaccgtggtcatcaccgacgagtgccccggtggcgtctgcctcgccgaggcggcccacttcgacatgagcggcacctccatgggcgccatggcgaagcccggcatggccgacaggcttcgcgcctctggtatcctaagggtcagacaagaagggtcccngtgcagacagcggcgtgacatcgccttccggtggnacaggggctcacccgtcttttnnagggggctgggcnagtccnagaagggcnacgggaacttagcgccggcaacttatggaggccgggtgcggacaaggaccccgaggtgcaaaattgggcccgctggggggtttaaattcaattcggaaagggttgaacgccccttttnttccggttaaatccaattcggaagggccttctncacagaagta

SEQ ID NO: 30 - DNA, 980 bp, Zea mays
  misc_feature (911)..(911): n is a, c, g, or t
gacggccgcgcgttcgggagatggagggagacgacttgtcatccttgtcgccatcaccggtcccgtacattttcggtggtgggttgaggggaaggaagccaccggctatggagaaggtggttgagaggaggcagcgccggatgatcaagaaccgggagtcggccgcgaggtcgcgccaaaggaaacacgcatatataatggacctggaagctgaattggccatacttagggagctgaatgattacttgcaaaaaaaacatgttcttgtgttggataatcataagagctacttcttcaagaggatgcacttgttttttgtccctcctctttcaaccatttgtttcctggaaacatataactggtccttgttgtgcgtggcgcaccgcatcctgtcgtttattaaactgcacccttttttggagccgctacccgaaaccgcgaagattttgctcattatggaggtgtcccccttctatacccttttttgatcataggggggctgttgccccctccaccccttataatattttttctgtcctgcctgttcctataaaggtaaaaaaattttcctttttctcttcctctagcccccggtcgctcttccgggcggggggggaattatttttttatgaggggggccaccccctaggaaccctccctttttttctctcctgtaggggggagagaaaaaaaacacgacacccatcaatcttccgccgccgtcgagatgcccccgccgctacctgtccgcgtgtgcgctttccgtgctgcttctcgcccactaagtcttttctcttctcttctttctccgctcgtcggtctctcccgttccccctatgtccaactgttcaagattcgcgaatttagaagtataaacgctttcattccagtactccgtccccccgccgtgntgagtgtatattgcgtcacaaattgccatcccgctctcctcatctcaaagtccctcaacaaactaaaat

SEQ ID NO: 31 - DNA, 551 bp, Zea mays
cattctgaagacgtagatggaaattctggggacattttaaggacccaaacctggctctaattttcttcagtatgctgaacctggggagcaaaatagcttaatgcttaatggaactatcatatcaaatgcaaatgctggagatttttttgataattccagccacagtgatgggtttctagagctgaaggattttggagatgctgcaaatctggatttccctttgggcaatggatcatccatctggcctttggattgttgggcatggaaaacacctgactcagcggaatctttaaatggaactaatgatgagattcctccacttcctgatgaccagactttccagccagatgagctggaacaactgttacagtcaatacaagaagattcccatttaggctcaagtatcattgaccccccacattcttctatgacaaattcagttctgcctgatgaggattgtttgatgttctatgatgcaccgttcgattccaccatgtgtgatgatgggtttgcacagaatgggatccttggctctgcagcaaccaatctat

SEQ ID NO: 32 - DNA, 814 bp, Zea mays
gagacaaaagcagttcatctgaaatttactttggtcgtgggatacagcctttacatgttacctactagtacgatataacgctcaatcccagaatacgacggagtgtacaatttctagcgtgtggttcatttctatgctggtctggcaaaactatatacagtattgggtcacatgagcttgctattatcgcccatcacgactcctctagtacgtggccggtgactaacgacgtggcttcactgaaatctatcagttcttcttggttgtcgattggtggagatgttgatcctctcgtctcgcagcatgttcatgctgggagccagcagtcttgtgtagcgatcaaaatacagcagctgcttcatgagaagagcaaactcccgaggaaatttcagcccgtaagactcgctcaccctgaccagatcaagaaaaagagcattcatctgcctctcatcaaggacaacattagcagatactgctgtagcatcaggggtccttgctgttgccactatgatttcagtatccaggtcctgtatcgatgagaatatctttcgcaggtcctttgcaaattcattagtatttatatcattccctgtagcacccatttcagagagggcagaggccatagcatcataatcctcagttgcaaaagaagccaaaaagacctccatagctgcccaagttcttggagatattcgaccaacaatcccaaaatcaataaaaccaattcgcccatcacggagcaaccataggtttccagcatgcacatcagcatggaaggattcacatgaaattaagcggacaaaccagcggacgc

SEQ ID NO: 33 - DNA, 483 bp, Zea mays
cttcgtcttggccgcagcgggcgcgctctccatggcgtcctaattagcctagccgcaacgccgcgcccgtgcctgcgaagtagggtgtaaagttttgtatatgatgccaggcatggatgaaccccttcttggcaatggtcttaagaccagcgggaaaagagagagcctggtagtggccgaggtcagacgacagatgtaccttgctgggccactcatcgctgcatggatcctacagaacattgtccagatgatatctatcatgtttgtcggtcaccttggtgagcttgccctctccagtgcctccatcgccacctcctttgcaggcgttactggcttcagcttattgtctggcatggcgagcagcttggacacactgtgtgggcaatcgttcggggcaaagcagtactatcttcttggcatctacaagcagagggcaatccttgtgctcactctagtcagccttgtggttgcgattatctggtc

SEQ ID NO: 34 - DNA, 624 bp, Zea mays
ttcacgagggtcaccggcacgcagacgctcagcaagagccaagaggacatcgtcactcagcaagaggacatcgtcaccggcaatggcggagtaccagggcgagtacgggcacccctacccgcgcgtcgaccagtacgggaaccccgtgccgccggtggaccaatacggcaacccgctcccgagggagccggtgtccggtttcggcgccatcgctccgccctacagcgctggagacagcgccgcggggcacgtggcggcgcctgtcaagtacggtgccgacgccaagtatccgcacgatggcactggaagcggcggcggcaccgctccgaccggtgtggcgtactccagcggtggcgtcgcaccagccgagacggcgcttgcgtcgtacgaggagggcatggtccacctccagccgaccggggaggagcacacgtttggtatggcctcgcagctccagccgacccgcggggaggagcacacgtttggcatggcctcacagctccagccgaccggggaggagcacacgacgctcggcgagaagctgaggcgctccggcagctccagctcgtcctccgaggatgacgagcaaggtgggcgccggaagaagagcatcaaggagaagat

SEQ ID NO: 35 - DNA, 590 bp, Zea mays
gcacgaggggcgtgtgcatccacgtcgccgagcggggccccgaggatggccccgcggtgctcctaatccatggcttcccggagctatggctctcgtggcgccaccagatggccgcgctcgccgcccgcgggttccgcgcgctggctcccgatctccgcggctacggcgactggggcgtgccgtccgaccccgccgcctacaccatcttccacatcgttggcgacatcgtcgcgctccttgaccacctccaactcacaaaggtgttcgtggtggggcacgactggggcgcgcaggtggcgtggcacctctgcctgttccggccggaccgggtgcgcgccgccgccgttctaggaataccgtactacgctcgacaagctcaccccatcatggaggtcttcgcggcgtttggcgatggcttttacataaatcagtttcaggagtccggaagagctgaagccgcattcgctcattacgatgttgcaactgtactaaagaagttctactccattgaaatagatgaactcactgctcctcctggagtggagatcatagactttctcgaggcatctccatcaccacttccttggatc

SEQ ID NO: 36 - DNA, 432 bp, Zea mays
tttttttttagggggagaaacaaactgctatacaggcaataggacatccgttccatacaacaaggacttgtgtacaatgctaaatactattacccattggcacttggcagaaccagcatactgctagacattatctggctgtggaggccagagagccaaaattttggggacaattctacctaccttatcctccaacataaactctctgcctgcagttcagccactttctccctattcttggtctcctttgccggggtcatcatggccgatgtggaagaggttgaggcggctgtggctgaggcggagggagtacattggcttcttgtactcggcccaggggaagggccggtactgcctgggtgagttggctgtgactgtctctgggagggccaaaattcgtgcatgcagggggggcccagcgaagtagatcgt

SEQ ID NO: 37 - DNA, 1851 bp, Zea mays
caaacttcaatcctgaaacttaccacttcaatcctgacacgcatctctgttcctatgaaatcccacagttactagtcgttcatcagggagtattaaggagcacgagggcgcagaagtgcaataaatctaccagacttgcagaaatgaatcgaggaggcatagtgtcaggagaagaaagttatgcactggtacattcgactctgttgatcgctaatatacaacagaaatttgggttctccaaatcctgaagaatgtacaagtaccataatgttaaatatcctgtcgagtccgatcaacaacaactcagttaccagggacctgtcaatgttctccgcaggcatcgcttcttttgtgcatatggattgctgaccaattccgggacctggttttgctgcatctccattatttgttcctgcttcttctgcaattctgcattttgttccttcagtttctgaacttcggcttccaactccattgtataagcctgcttacgggcacgggatctagctgcagactccctgttcttgatcatcctcctctgccgccgctccacaaccttctccacacccgcaccgctcctccttccccttatcactccctcaaaggggtatggcaccggagccattggcgatgacagatcctcatcgctcttgcccatagaatccagctgggccaccgacgtatccaccggactcacggtgaccgcaccacctgccatcccagccaccccaggcatcaacccgttgcccatggcctgatccccgatccccaccggcgcaaacaccatcgctccagccccggcgtcattggcgcccccaaagttgccgaaaaagatggaggcgccattactgaccgcctgaatcggccgtggagcaaccggctgcgcagggacagcagcagctgccgcggcagggttgtcacggacgaccccggccctgaccaggaactcctccagcgtcatctccccgagagtcggctgtcggttgggctgcggctcctcgccgccagccgtcccgggcggcgcctcccgcacgaagtcccgccagacctcgtccaccgtcttgacgctgagagtgcgcggcagcgcgagagacccctgtctctgcagcgccgccccgccgtcgacggctgcccccagcgcggacaccgaggccgaggccgaggccgaagccgacgccatggcctggctctcctcggcggtccagatgctccgcagcagctcgtccatgttcatggagccgaagtccttgccaagccctccccccatcccgccgagcgtgttctggaactcgtcgaacgtgagcgagtagatcgacccctgcctcgacagcggatccggccccgccggccccctcctctcgcattcgttgagatccatcgcctccccctcctctcactgcggcgcgacgacgaggcgggcgacgaggaagccaggcggaattcgcggcgggctatataggttgcttgcgggttctcgaagacgccaaagcgaaagcgatgggctcgtgcgcgggctcaatcgatgtgtgcgacgaccgaattggaaggcacgggcccggactgtgctgtgcctgtgtgcgcctccggctcgcctcagtggtagtggtggactggtgtctggtggtggtggtgttggggttgggtgggaggaggctcgcgctggcagcacctgtcccgctcgccgagttgcctcgtcttggtgcgggcgctgtcgtctcgcgcggcgggggcggaggtcagagtgcggcgggcgacaggtgtccctcccgacgccggtgccggcggtgtgcgtgtacgtgctaactgataacgtgaagtcgcccggatcgtctgcgttgatgcacgcgcccg

SEQ ID NO: 38 - DNA, 343 bp, Zea mays
taaataccctgcaaatggcccatgcatcgttggctggaatatttttgtcttttggtgttttgttaggacgtgaggggtcgccgagtgaagggagcctgtactcatgcatcatccaatcagtcttgattcctttcgccgctctccctttgtaaaagacaagagacttcttcaggcctatgcacttggccccttcagaagagtaaactggcctatctgttccggttgctttccagaatccagctcctgtgactctgtttggtctggcactgttctgatacttccggtcccttgggcagtagaagtaccattccttctccccggtgctcgcaagctttgggagatc

SEQ ID NO: 39 - DNA, 142 bp, Zea mays
taatagatgctggacagcggaccgtctagttcatagaggtcttgaccacccggtgaaatgcgttctatgtgatcagcagcaggagacaatccagcacatcttggtctcttgtgtcttctccaggaatttatggtggcagatc

SEQ ID NO: 40 - DNA, 557 bp, Zea mays
tcgagcggggcgcgcgggcagggacttgtgtggaagactggtgtttatcttatcactctcggtatgctcattgcgcttctaatgggactgaacatgtgctggactgcgaatcactggaggtcttggtgttctggcactcggttttacggacgcgacaagcttggcttgagaaggtggcatattcactggtgatctttttctgggggatggttatcactggtggtggcttcaacaaaacgggcataccggacacactatgggaggtaggggaaccatattcacgaatcggtagggcgaaaggtggtgcacttcttggcggggtgattcttatcctttcaaacggggcctctaatggtcctacagggaatttttcttacgcatatgaccatggataaccatttaatactttatatacatatatgctcttctggttgcaaaattcataacacatggtatttcgagggggtgtgtgctcaatggcggcatgtggcctctggtctttattcatgacaaggatgattaaatgaaggaaatggaagcattacattatcttgtgt

SEQ ID NO: 41 - DNA, 296 bp, Zea mays
tagcgcggtcgcggcacgcccacacatagtattgatgacctattgggtaaggactggaccattaacagcatgaaaactgctaccagctgactgttgaatgctgcccttagtataattaaatgaattatgatccattgcatcataggatgccataccatcctccatcatgccaatgccagatagattgtgtgatgcctagccaagaatttcattctgtacatacccatcattactaattggggaaataaacggtgcattatacaacatcaaataaatgacctcatgcacaactgaat

SEQ ID NO: 42 - DNA, 554 bp, Zea mays
  misc_feature (546)..(546): n is a, c, g, or t
gacggcatcgttgtccacgccgagtcgccgactgatcacttctctttcagcgagtacacacatcacacagcgaagggcagcgcatcgtgctgcggcggccggaggtgatcgacaagcacctctctaggaataataaataatggcgcagttggtggacaaggcgaaggggttcgtcgccgacaagctggccaacatccagaagccggaggcggagctggccgacgtcacggtggcgtcaaggtgccctacgacttcctggttagcctcgccaaggacgccggcagggactgggacatcgactatgagatgcgtgtcgggctcaccgttgacctccccgtcgtcggcaaactcacgctgccgctcaccaagtccggcgagctcaagctccccaccctctccagcatcttctgatcgatcgatctgcgtgctgctcgctcgatccgtaactgcggccttgcgtgttcatgactgatctgcctactcgataatatgtaaaccgctctcttgagtgttgttgttgtgctgcttgagtagtacgagacctantaataata

SEQ ID NO: 43 - DNA, 1534 bp, Zea mays
atgaataaaattctattcttgttttttgtcatcacgtacgcactgtatttttttccttctgatttctccatagtacacaaataatgtatttacacatctgtcgtcattaattgatggcatagggcatacagacatatatatatctctcttttcatttctccttctttttgaaggatgtgtactgagatggtactgctactatatgtatatatatacctactactactacggctacatgcaataccacacaggaggcacacacacccaagcctcttgtagcactcatctatatatccatcctgttatcgtcgaggcatttcgatccgcatcgctctccataacaataatatatatataatcttcctataaaacataatcaactaattgaacgaattccacatctgcgtgaagccactctcagctaagtactcaaacccatcctgagaaaaattgcttggaggcgcctccctcttgacgctgccttcgaacctgctaaactggctcatgagaacatccttgattattgacttccccatctgctgctccggatcagccatggcggcagacggcggcagccgggcggcgttcatcgacgacgatggctgctgagaggggttactggagaagcagggcacttgctcataaccctctaggttctgcactgatgatgagccaggctggtcaaaggagatattgaagttgttgtcaataaggggaggcaatgaagttgtggctgcatcaatattgaagctgctgctctctgtgggcggctttgcaactgttgccctactcttgtagaaaactctacacaagacccagtcctccttgaaaggtaatttcatgggatcatctcgcccttccatgcgaaactcatgcataacccactcggtcttctttccctttggggctctaccttgataaaacacaagggttttgcgcataccaacaagtaaccctttccggcttattggacggtctttccctgtggccttccagtatcccgaatcagttgctctgtttgtacgctggccagtggcatactttctatctctaaggctgtagaaataccactcttttccaccaatgcacgcgatgtcgggaaggtcccagggctcgcacttgttgagatcgacgtcgaccatggtggggcagccgtagatgctcaccaccacagggcctccgccgccgccgagcttcttggccaggtagtccagcacgagctcgtcgtcgcgcgggtggaacctgaaccccggaggcaggctggcctccaccatgctcagcgacttgatggccatcatcggcgtcgtcgcggagctatatatatatatacagctctcaagaacgacctcgctcaccggcgcgcggcagctacgtacaggtgtggagctgcttctactcctcctcctccttctcctacccctgtatcatagaagagaaattaagaagaagctggagagcggcgagaggcgggcgttatataacaggaggagcccgcgctgccgctgctgtacgtggtcaacttctgcggatgccc

SEQ ID NO: 44 - DNA, 412 bp, Zea mays
actctctggaattgctgttagggagaggtgagtaaatagaggcgggcatattgtgttgtgaaagcccaggatctgtcatcttgtaatcttatgagctactactctatgtagaattatccgtgctttcttggttgaggagcagaagattgtcaagaaggtcctgaaaatacagaaaaccaaggacaagacagctgcaaagtagagctccaggaatgggaagcctagacactgcgagaagtaattttggtggatggaaaatatgtttgccttgtgtcgagcatttagcatgtgagacatgcctgttgaagtgtttgagtttagagaccggaatccctttcacctttgaattgttgctatgtcgggacatctgctcccctagttgctttgttatgaattgagatcatatctgggc

SEQ ID NO: 45 - DNA, 337 bp, Zea mays
tacatggccctaagtccaacatgtggtctgaagagaaaagaatccacctcatctatcaccaccatcttcatattagggtgagcagccaagagacatgttaacagatatgcagcacttgatgctgctctcctttcaggatcaccaagtttgttaacaagagctgtgagcaaacgacgttcctgttctgacttacttttcaaaagcatgaaaactgtcttcattgctttgtccttaagatttggcagcatatcttttaccgcatcctccaatgccataacaaacctttcgtatctctgttttaagcagtcctcccaatgccagaagagcagaagtgagt

SEQ ID NO: 46 - DNA, 791 bp, Zea mays
aactaacggatcctctatgatgaatagagataatcaatatcatataatatccctgacgatatggatatttaataacaaaatatgtatactaagtaacgtattagagaacgcatagaactcatattgtctctcaattgggaaggtagtgtagcagcatgcagcaatagagccttttcatgttgtggtgttgttacgtccagctgcacatatataggatacagctctataatgctacgggaagagatgaactgaacaccgtttcttttgcgttggttgcctctttctcccagtttatccgcagtgtgatccacatgagcagcacaagcttggtgaggctgccacaaacgatgccaagccacagacccattccattcaggtgaagcacaaatgcaagcagcacggccatgggaatgccggccaagtagtacgcaccgagattgacgcgcgcgccaatcttctgccgaccgcacccagtcagcactcctgatagacaactgtggagcccatccgtgaaaaacgaaatcgccaggaccggcatcatcctagcaatgtacgtgacgacttcaggttcgttgctgtacatgtagccccagaagctgcgcaggagaatcatggtagagccgagcagcaagcctgcagacagggcgatgcacatcaccactcgagctgctagcctcgctgcttgaggctcgccggcaccaagctcattcgaaacacgtgtgcttatggctgtgcaaagaccatacggcaccatgaacagcaaggcgccagtgtttagacatattgacagt

SEQ ID NO: 47 - DNA, 1672 bp, Zea mays
acaagcaacagggccttttcacttttgatcatgggacccgctgcaaaacaagcattcaaacagctcagtttttagctgagttcccattcagtttagttcaaaaactaatctgcaaaggccggtcataaacaaaatccttcctggcacaaaaagccacaactccaaagccatggcacaaaaagcaaaatacaaaccaagctccagttccaatacattactctagcacaagctttcagcacattacaaagtaggaatcaagaccacccaagctccaatcacactacaattcatcaccaacagaaccttagtcttgacgcttaacagaatccatacatagcagaactccagtacctctgaaacttcagacgagtccgaagtttcaggctttattattcagaaagctaaggtgaaaccatttagaagttggtagatagtacaatcaactagtgatttttttttgtttttttaggcaagggatgttgcactcaccacaagatcccagaaactaggagccagagtttccaggagaaataggtgggacgagtggaacgctcacgttgccttcagccaagaatgatttgcctaccgggagccaaacggagggagggacaacccctgacccggagctggaaaccgccagcagtcaccagctcctagcgtttggccgtccggtaacccctctagtcatgctttcaggaggtcgcagcagacttcagaggccgctgcccacttgaaggggttgccgacgatgaccccgtgctcaccgccgtccatgatgctcgggagccgggtgaagaaggggtgatccaagccgtggcagtgacccgcgtcttcgtggtcgtacatgcttgacacctctgaacccgacaggctggacacgctgctcgggttgcccaggtctgactgctggatctctgagcttggagacgccacctggcgcatgagggggttgctgaacattgccttgctgccaccaccagcatccttcccgctggattctttctttgtgttcaggaagcgtccgccagagcctcgcgggcgacgcagtgcatgctgatggcgtgactcatggagatatggcttcctgcctttgaccagcctgttttccctctctgctttggcacgggcacagcgccgacgcatgatggcgtcatattgcttagcgttcacataaattggtgcttctgttggcctattcagtggtataagcagacgacctccaggcgttgcacccattggataaggagaaagcaggccatagtgttgatcagcataagaattatcagcggaaatcattgattgaccaaggcccagctcaaaatgagcattgtatattgcaaatggtgattgcaaagcaatagtggcagagtgatcagatcctttcttccctttaccttgaggatccacggagaggttgaggagctcagggatccccctctccggcagcggaggcggctgctggggtgccacaggagccttgaccgacggcacgggaggagccagcggtccctggatgcggccgtcccggcagtgggcctccggcgacagggccagcggctcgccgctcagcatcggggccggccctgcccaccacggcagcggcgctccgctggcggcggcgtggccgaagccgaacccctcgtggctgctgctcctgaagctcatcatcgtg

SEQ ID NO: 48 - DNA, 627 bp, Zea mays
  misc_feature (613)..(613): n is a, c, g, or t
gaagaccaaatcaacttttttcctcaccataaggaacaatgttactcacgcaacatacaaccttaaaatcgtagtagaaatcattgagccctatgataaggcaccaataatttattatacatcgagtgaattgaatggtaaacttttcatcttgtacatatgtttggcccaaatagcgcacacatgattttgtcgggcagatgcatatacaggatcacaggaacagctgtgctatgcgtagttctggattatcttcgacagggacgagtatgttcccacgtaggcacagcaaaccctgacaactatgatgaacgagcaagctgctatctgatgccaccccacttttgtcttgaggatcgccaaaaaacacgtgcaaggcaaaatgtaggtcacaagcatggcaaacaaagaaccaaccaaggccatcacaagtccaaagaaaggcacagatagagcaatcaggagggttgatatcaccagagatgatctaagcatgattattgtagaatacttttgttggtttggtggcagcagctcttccaaactcatagccaatggaataatagttaatgcatatttggttattggatttgccaccgttgtcccaacagcnatccccaacacaat

SEQ ID NO: 49 - DNA, 388 bp, Zea mays
ttggccgcgccggcgagggcgagcatggcggcgtcgtgcgcgcgggccgccgcctcggccgtgtcgaaggtgccgagccagagcctgcagccgcgcctccccggcacgcgcacctcgcacacccaccgcccggcgctgccccggcgccggacgccgcggaacaccgggtgccgcgtctcccggaacttggtccgccccgctggccgcttcggcggcgacgtccacaccgtctggtggtgctccggtaaggtcgaggctgatgccgacctgcatggcgagctcggctctccggtcatccccttcttggttgggcacatcttcttctgatgatgatgatcacttctctgcttgagcctcggatggtgcgggttccttttgccaacacaat

SEQ ID NO: 50 - DNA, 811 bp, Zea mays
ataaaatgaaattatcattaacatagcgagtctttgatcattattgcaaggccattatttgatctccacatatacataagcactaacatatagagacacggcacaaccatgagagccgtatataggcacaagatctttaattgacacacaagacaagacgaagacgatgaccgaattataggactaatcgagcatgatgtagcaggtagcctgcatcaagtcaagccgaaccataatcctacagctcgtaatacgagcgagctgagtcgatcagactgggctcgctggttcaccgaggcctgcaaggcaccactggacgtatgtaaacaccgatagcgtcgacgagcctggttcccgcccgcgcatagaatcccgcgatgctgctgccgttgggcgccgtgatggagaaacgcgtcccgttctcgaccccccaggggccccaggttctgctgctggtgacgagcctgagcgaggtcagcgtaatggcaccttcaaatgcgccgtatgttcccgagacttccctgacatcctctgcgtcgccaaggtcgatcgttcgaacattgccgccaagtccaccccaccgcccagcagtgcgcctctgcccagcgtcgtcggtgtaggtgaactcgatggagtcgacggcaacgccagcgcggacggtgatgctgtgcagacgccgcggtggctgctctgccgtgatgtcctgtgccgaacctccctgtccgccccatagtccgatcttggtgacggaggagatggactcctgctgcttgctaattggttgctgtgatgcgccaaacaccgggcagaa

SEQ ID NO: 51 - DNA, 973 bp, Zea mays
gcacgagctcagacggacctgcagaggaggtccgctcaccgcgcgccccagctgaaattccaggccaccggctgaacgcatccctctcaccgcgcccttggcggtggtacgttcacctcgccggttccccgacagccgtcccctccgtgatttaagagaggcccatgagctcgctgctcttgtgcccgcggtgctactgacggtttctctagatccgttcatcctggtggttttgtgaggtcgaaagcggcgagcgaattagaagatgctggacaagctgtgggacgacgtggtggccgggcctcgcccggagacgggcctcgagaagctccgcaaggccaccaccgcccgcccgctcgtcatcaacaaagacgcggacggcggcagctacaagcgggcgcagtcgatgccgtcgaccccgacgacgccggtgacgccgtcgtcgtcgtcgtcgtcgacgacgccgcgcggcgccggcaacgtgtggcgcagcgtcttccacccggggagcaacctggccaccaagggcatgggcgccaacctcttcgaccggccgcagcccaactcccccaccgtctacgactggctctacagcgacgagaccaggagcaaccaccgctagatcgggcgagatggatggacagtgaagaggccatgtttgctggtccttgtggttatctaaaacgcacgcatgctctattatagctagtcatcactatatatatacttgtgtttgtgtattgttgttcttgttctgctggtgtctccgccgtttaatttgacctatgttatggagtgagtgatatatgtgccgtcactcctagtatatagtagtgagtgactagttggtatgtgtagtactgtactatcttttctccatatgcatgttttgccagcgcgtaatgaatgtaatgtcagtactgctactacgtgctctgctacttccaattcagtttccttaatcttgatgcat

SEQ ID NO: 52 - DNA, 1866 bp, Zea mays
actggacgcctgcggtacggtccggaattccctacataaagaggcgtccggctatggcctttcaagacatccctggccctggtgacaagcccatgattgtagtctcctacaagggtgaggagaagcagttcgctgctgaagagatctcctccatggtgctcctcaagatgaaggagattgctgaagcctacctcggctctactatcaagaatgcagtggtgacagtgccggcctatttcaacgactcgcagaggcaagccaccaaggacgccggtgtcattgcgggcctcaatgtgatgcgtatcatcaacgagcccactgctgctgctattgcctacggtcttgacaagaaggcgagcagctctggcgagaatattttgctcatctttgaccttggtggtggcacgtttgatgtgtccctcctcaccatcgaggagggcatcttcgaggtgaaggccaccgcgggtgatactcaccttggaggcgaggatttcgacaatcgaatggtgaaccacttcgtccaggagttcaagcgcaagcataagaaggacatcagcggcaaccctcgtgcactgcgccggctgcgcacggcgtgcgagcgcgccaagcgcacgctgtcatcgaccgcccagacgaccattgagatcgactccttgttcgagggcatcgacttctactctacaatcaccagggctcgctttgaggagctcaacatggacttgttccgcaagtgcatggaacctgtggagaagtgcctgcgcgacgccaagatggacaagagcagcgtgcacgacgtcgtgctcgtcggtggctccacccgcattcccaaagtgcagcagctgctgcaggatttcttcaacggcaaagaactctgcaagagcatcaaccccgacgaggctgtggcgtacggcgcggctgtacaggccgccatcctcagtggcgagggcaacgagaaggtgcaggacctgctcctactcgacgtcacgccactgtctctcggcctggagactgcaggtggcgtcatgacggtgcttatcccgaggaacaccacaatcccgaccaagaaggagcaggtcttctcgacgtactccgacaatcagccgggcgtcctgatacaggtgtacgagggtgagcgcgcgaggaccaaggacaacaacctcctcggcaagttcgagctctcgggcatccctcctgctccccgcggcgtgccccagatcaccgtcaccttcgacatcgacgccaatggcatcctcaacgtctctgctgaggacaagaccaccggccagaagaacaagatcacgatcactaacgacaagggccggcttagcaaggaggagattgagaagatggtgcaggaggctgagaagtacaaggccgaggacgaggaggtcaagaagaaggtggacgctaagaacacgctcgagaactatgcctataacatgaggaacaccatcaaggatgacaagatcgcctccaagctctcggcagatgacaagaaaaagatcgaggacgccgtcgatagcgccaccagctggctggacagcaaccagctagctgaggtggacgagttcgaagacaagatgaaggagctcgagggcatctgcaaccccatcatcgccaagatgtaccaaggcgctggcgcgggcatgggcgatgcggctggcatggacgaggatgccccgtctggtgggagcggtgctggtcccaagatcgaagaggtcgattaaattggttagcatcgggcggtttgttttggtgtggtctgaagtactcctgaactctgaaggttgtctgtgagatggggtggtgtccacagtctgtgggctgtggtcgaacttcttaataaatataagttttagttcctag

SEQ ID NO: 53 - DNA, 1893 bp, Zea mays
  misc_feature (166)..(166): n is a, c, g, or t
  misc_feature (207)..(207): n is a, c, g, or t
gcccggctggatgtccttgtaggtgctcttgatgtcgtcgaagacgagcgacaccgggatcttgacggtctcctggccgtgcgcgtggatggtgccggcgtccgggatgaggcccgacaccagcttgcggccgtcgctgtcgatgaggtagtcgatgtccacgagncgggatcgggaccgggttcgggttcttgatgagcacgtccncgacgaggtcggcgcggtggaggctgatgtgcgggatgtggatgccgcacacgtcggccgtgggcttgccgaacccgacgacctcctcgatcttctcgccgatgtcgtggatgaagtccttcaccttgtcgatgaagccgccgccgccctgctccttgtcgccgccgtcctcgtgcttgtccttgcctccgcgctcggtcaccgtcaccgtggggtcgttctccgacgacgacgacatgcttgctctgctagactgttacgctgtgggcagtgccagcctcaacctcgacctcccccagtcccccaccgaccaccggcctcctttcccgcaggcacgggtgcacggcacgcggtttccactcgcttcgtccgcgttcggatcgccctcagagtaacagtctagcagagcaagcatgtcgtcgtcggcggagaacgaccccacggtgacggtgaccgagcgcggaggcaaggacaagcacgaggacggcggcgacaaggagcagggcggcggcggcttcatcgacaaggtgaaggacttcatccacgacatcggcgagaagatcgaggaggtcgtcgggttcggcaagcccacggccgacgtgtgcggcatccacatcccgcacatcagcctccaccgcgccgacctcgtcgtggacgtgctcatcaagaacccgaacccggtcccgatcccgctcgtggacatcgactacctcatcgacagcgacggccgcaagctggtgtcgggcctcatcccggacgccggcaccatccacgcgcacggccaggagaccgtcaagatcccggtgtcgctcgtcttcgacgacatcaagagcacctacaaggacatccagccgggcagcatcatcccctacctcgtccgcgtcgtgctcctcgtcgacgtccccatcatcggccgcgtcaagatcccgatccagaaggacggcgagatccccatcccttacaagcccgacgtcgacgtggagaagatcaagttccaccacttctccttcgaggagaccaccgccacgctccacctcaagctcgagaacaagaacgacttcgacctcggcctcaacctgctcgagtacgagatgtggctcggcgacgacagcatcgcctccgccgagctcacacagaccgccaagatcgagaagcaggggatcaccaggatgcaggtgcccttcagcttcaggcccaaggacttcggatccgctgtctgggacatgatcaggggaaggggcacgggatacaccatcaagggaaagatcgatgtcgacactcccttcggcaacatgaagctgcccataagcaaagagggtggaaccacccgcctcaagaaggaggacgacgatgacgacgacgacaactgaagtgaggactgctggggcgctgctgttacctttcacgaaacgcagcgaagcagaggatgcggggatcgtcgtcgacctgatacccatacccttagcgctggttaagctcttgcctttagcttatggtgctctgttgttttgcattgtctgaacatcctctcacatcctgagtgtacgttcagtttgaggtttcctgtgttgtccgtctgaattccttcaaactttgcggttggaactggatgaagaataaaactccaacccgtcctggttcttttgtgggtctgtttggaatagatgctgcctgccaatgatcctg

SEQ ID NO: 54 - DNA, 2118 bp, Zea mays
ggctcgctcgccttcctcctccccactccactccattccaacgcaacggcctcgccccgctttataggccgccgcccgcgccacatcgccaccgtctcgcaccgtcgcggccacccattctctctcgtccatcgcatcgctccggctcccagcgcaatcgatccatccgtccctaggtgtgcttcagctatgcagttcagcagcgtgcttcccctagagggaaaagcgtgtatgagcccagtgaggagaggcagtggaggttatgggagtgagaggatgaggatcaactgctgcagcatcaggcgcaacaaggcactgaggaggatgtgtttcagtgcaaggggtgctgtgagcagcacgcagtgtgtgctcacatcagatgctggcccagacactcttgtcgtccgaacatcctttcggaggaattatgctgatcctaatgaagtcgctgccgtcattttgggtggtggtaccgggactcagcttttccctctcacaagcacaagggccacccctgctgttcctattggaggatgttacaggcttattgatatccccatgagcaactgtttcaacagtggcataaacaagatatttgttatgactcagttcaactcagcttctcttaaccgtcacattcatcgtacctatcttggtggggggatcaacttcactgatggatctgttgaggtgctggctgcaacacaaatgcctggggaggctgctggttggttccagggcacagcagacgccgttagaaaatttatctgggtacttgaggattattacaagcataaagctatagaacacattttgattttgtcaggagatcaactctatcgtatggattacatggagcttgtgcagaaacatgtcgatgacaatgcagacataactttatcatgcgctcctgttggagagagtcgagcatctgactatggattagttaagttcgatagttcaggccgtgtaattcagttctctgagaaaccaaagggtgctgccttggaagaaatgaaagtggataccagcttcctcaatttcgccattgattccccagctgaatatccctatatcgcttcaatgggagtttacgtttttaagagagatgttttgttagaccttctaaagtcacggtatgctgaactgcatgactttggttctgaaattctgcccaaggctttgcatgagcacaatgtacaggcatatgttttcactgactactgggaggacattggaacaatcagatctttctttgatgcaaacatggccctctgcgagcagcctccaaagttcgagttttacgatccgaaaacaccattcttcacttcccctcggtacttgccaccaacgaagtcggataagtgcaggattaaagacgcgatcatttcacacggctgcttcttgcgtgagtgtgccatcgagcactctattgttggtgttcgctcacgcctaaactctggatgcgagctcaagaataccatgatgatgggtgcggatttgtatgagaccgaagacgagatctcaaggctactggcagagggcaaggtgcccattggcgtaggggagaacacgaagataagcaactgcatcatcgacatgaatgccagggttggaaggaacgtctccataacaaacaaagagggcgtccaagaagccgaccggccggacgaaggatactacatccggtctgggatcgtggtagtcctgaagaacgcaaccatcaaggacggcaccgtcatatagagactaactttggccttacgcatggcgtgcaaggttacaggttagtcatcgtcttgagagttgagacttagtttgaggcgcgcgcccgaccttgacttgagccgtcggagggacaagaacatgaggaagaagggctggtggtgccggatgttgccatggacgacgagaaatggtttggtgcggtcgcatcggttccagtagctagctcttccgatgttattaatatatgtatctagtggagtagtgcgaacagtgcaataagctgggcgagcaaagccgcggcaactcttggcttggggattgttggtgcatcttgtaaataataaactcggacgcagcaaatgaaacatgcccctcatcttcttccaaaaa

SEQ ID NO: 55 - DNA, 2387 bp, Zea mays
gcacaaagcaacggcagtatttcattataaaattataaaccaacgcattcagtccttgtatcccctcagaccatgctgtggcatgtccaaacgaattcgaacacgccaacagatcaacaagccatcagtaactgggttcaggaaccgaaaattctgaaacaggtatccacaagaacatcagatattacagaggttcagaatttcagcgcacccgtctaacagggtctcgctcttgctacattacattaggaaataaaactggcagccctgggcttgaattgcaactacacaacagcgacaacattagcaagacatctacaacaacagcaaaagaagactacgatgtactaaaaccaacaataacacacctcgctcttttccaccttgtcatttctaccacttgtttttttatttatttttcagctgccttggcaatgccgggatgtcttactgcagggtacggctgttgaaaggatgccacaggttatgtacagaagaccgcacaccaggttgacgccaggaacccatgtgcgcaaaatgtcatgccttgcaccgcaccaggatagatttcatacccatccatatgtcccaacacagagaagcaggagcagagccaccggaagaaccagccagatgatgtatgattggaagcctcccttctgcattggtgctctcacgtgtggctcgagacaactctcctgcttgacatccttgttgctttcctcagaagtcttccgcaacctcagaacagatttggcttctggagaagtcatttcagcaccatattcagggatgttcttttgctcatcatcatggatattaccaggtagatcatcagcacttccagtgaggtttgtactcgcatcctcttcaatctctgctttttctgctttgtgctgacttcctggttcgtctataatgcagcttgatgaatcatcagtactaggacgctggcctttgttaaggcctgactgtagccgcagcctttgcatagcagttccctgttgagtgaatgaactctctgagcttgatcttggagcagggtgatggcttctaataacaatccctgttgactcagcctcatccccatcagaagccacatccttctctgcagtggactcctcaacagaatcgttcaaacagtctggagttagaacacatgatacttcatcttcactctcatctttagttatgatctccctagactcaacctgtagccgcagcctccgtgctgcattgccctggctagcgaacacatggtttggttgcacagtggagtccaactgttgaggcctaacaataattccagtctcttccatactattgaaaagctcattgaaggaatcagcaccagagtcaacagaaagtatgtcttggtcagtggtgtcacaaggaagcagaggatttggttcgtctggctcaaatcctatgtttgcccaccagcattgatcatcttgaggctcaaccttcatattccaatggttctcaaattctgttggaatgtcagaatcatactgaacttttgatgttgttgatgaatgttcatcaggatcaacaagtgtttgattcaagaaagcatcaaggggatcaagaggattcatgatgccatcaaaaccaaaagctccttgttgtatatcagtgaagaatgcattttcaagtggtagaatgggagtgaaatcagacacaaatttgttataatcatcatttccattgtggggattaactaagtggcctgaagcaccaacagaaggatcaacctcttagctacaccagcagcatgtccgtggaaaggtatatgggaaacatctggtgcagtaaccatcaagttatcatttctgtccgccagccaccttgtcattgaaccaccattggtttcaacagattttggcagctcaatcgggctttcatgcagagcagattctggagattccttatttaatggtgtattagcttcctcattcgcctctaggttgtcaggtgaagaacgagaaggagtaggtgagtagccacttctatccacttcctctgggctggagcgctcagttttctcctcttgcttacggaagaggcgataaagaacataaccaccctgctcgccggactcgaactcaggctcggtggtgcggtactcgtgcataatccaccccgtgcgctcgcccttgggggcacgaccacggtggaagacgagggtcttcttcataccgatggtatgctgcttgcgcttgtcgcccttggacttgattatcctgtccttgccagtagccttccagtatccaacctcggtggccctgttagacctgctaccgttggggtacttgcggtcttgtgggagaagaagcggacgcggcctcttttgagcattccggaccgtactgcaggcgaccagt

SEQ ID NO: 56 - DNA, 1278 bp, Zea mays
gggccagaaagtaagtcttttaactgcacgaaagctagtattacatttgaaaataaccatgaccgaaaaacggaaactcacacggctaaataaaattccaactctacagatttgaactttggatatgaagattgatcgatttccggttcgagatacgttccggatcccaacattctcgtcacaaccagtctgtttattcactgttcacatcacaaaacacatttggattcagacacagaagcgtacatcgaatctgtacacctcctgagtcctggcaatggcgcatgtcgaactccagcacctcatcattcacacagccaatgtcatcagcaggactacgagtcgaactccagcatcgcatccgcgtaggcgtcgttggcgccctcgaggtagagggagtactactactacgcacgctgcagtgcagtgttttcagctgcaacaaacaacctaattgatcccctaattttcctcattcccagattgctacgcactaccaaccacatacaggcataaaacatcatcaggtgaaacaaggcccaatgcagtgcaaaaaagaggaacacagtccagcttatatccgaccgtaaaccctacatgagaggaggcaaggaagccttggctccacattttcccttccttctattacaaaagtctgttcgttctatgctctcttttttcactgaatggccacagtggctgcacatcaggacttgttggagaaaacaagccaacatgtgcaccggacggcgacagaacatgcccgccgccgccttcctgagctccatccagcaccagttcctccttaggcaacaaataaccaggtggcccaaaggggtgttcgcgggctgatttgtttggagacccgaaagccaagtcattgtgcaattttcctggcatttcatgtgaaaggaacaggcttgatgtatcaggtggcaattgttggaaaggtgctttctgaagccatggatcactgtcattcaaaccagtacccaggggacttcttgccctgcctccactactgaaaaggttagcactatggttaaattgatttgtgttttgttgaaaccactgactctgaggaccttgcaaacctaaactttcctgaaccaatggcgtgctccacatttgccatgtgccttgttcactgctagtcacaggcagaatgggaccaccagaacctcttgcaactgatgagtgcgagggcttggtaagcttttcttcaaccgtgtgggatcttgagagaggagactcaattggtgaaggccacccatgtgg

SEQ ID NO: 57 - DNA, 1138 bp, Zea mays
aacaggagaaattgggttcctctttattgcacatttatgagaaactattaattgaagtcgacagcaaacaattcgaaacgacgaggccctgatattatatgcatgcatgtgcagttgtgcaccatatagtccgatccatagcgctagtgcactcttgcttgtcggtgtactaacgacccggccgggcacatgcacatgcattcacgtccgtttctaactacacacgtcgtcgtcgtggattaatcatcattagccacccggcagtcgcagcggacctctcccttggccgggtcggtgagcggctggatgttgcccatgttgatcatggactgcgcgaagctgctgaagaaggcggcctggctggtggcgaactggtcgacgacgggcgcggtgacgccctgcgcctgcggcgccgacttgagctcctggtccgagccgaggaagccccggttcacctccaggttggtgtagtagtggttgtcgaacaggttcggcgtcgtggggtccaggtcgttgagggccgaggggctgccgttctgggggcacctctgggccaggaacgcccggtagccggagttgagcgtggggtccggccggttcgtgccgctgaagttgtacagccgccccgtgacgaactggcactggacccgcccgaacgtgtgagctcccgagagggccaccaggtccacggtgtggaggcccacggccgcgaacttctgctccagcaccgtcaggttgtcgaacggcgacggcaggttctccgcgctcttgaagtcggccttcttgctgtctagcctcccaagaagcactgcccactttggtcctccggacagttcgaccgagatctctgcggcgagggcgaggatgtcggcgcaggagacgacgccggggcaggcgtcctccagcgccgccttcactttgtccaccaccgggaaccctcgcgccgagttgttgttggccggcgccagcttctcagtggagttggccacccccggaacggcgtccaggagcaccgagccatcgcagccctggacgaagcagtcgtggaagtggaggcgggtgaggctggcgtagatgcgcacgtcggacttgtgcgcctcgatcaggacctgcttcacgatgttgtaggcgtcagggc

SEQ ID NO: 58 - DNA, 1493 bp, Zea mays
ggtttctctcgtctttctcctccctctcctgacttttcttctagacatctcgcgggtcttatcgactccaacaagaacacactacacaccagccagcgagatagcgaacgctaggaacccagtggccatctttggagcggccatgacgctggatcagaaccatgccatgccgatgcagcccccggccctgcagcccggaagagcatatggagcagagggcagtgctgtggtgcatggttccatcagaacagtagcaggaggccctactcttgccttgaatgagtgccagattttggtacagcagaaaccccagggagattcacgactgctggcctctaatctgtggaagaagcgacctcgcagatcacgagatgggcctacgtcagtggcagctgtcatccagcggtgggctgagcgcaacaagcatttggagtatgaggaatctgaggaggcaaagcgaccaagaaaagcacctgcaaagggttcaaagaagggctgtatgaagggaaaaggggggcctgacaatactcaatgtggataccgtggagtgaggcagcgtacttgggggaagtgggttgctgaaataagagagccaaatcgtgtcgacagactctggctgggtaccttcccaaccgcggaggatgcagctagggcctatgatgaggcagccagagcgatgtatggagacttggcacggactaacttccccggacaggatgcaacaacctctgcccaagctgctctatcatcgacctctgcccaggctgctccaacagctgttgaagctcttcagactggcacgtcatgcgagtcgacaacgacatcaaatcactcggacatcgcatccacctcacacaagcttgaagcctctgacatctcgagctacctaaaggaaaaatgtccagctggatcatgtggtatccaagacggcacacccattgtagctgacaaggaggtctttgggccgttggagcctatcacaaatcttccagatggtggtgatggttttgatatcggtgagatgctgaggatgatggaaagcgatccacataatgcaggtggagccgacgctggcatgggacagccctggtatcttgatgagctggattcgagtgtcttagagagcatgctccagccggagccggagccagagccagagccattcctgatgtctgaagaaccggacatgtttcttgctggcttcgaaagcgctggtttcgtcgagggtctggagcggctaaactgaatttctgatgtttgaccgttgatcctcatcccacttcatgtctgagcttgtgaattcggaggcaaacattggcagaacttataagctctagcaattctaggctttacattcctctgtgatagttctctatgcatgggaactgggtttgcttcacaatttttgtaagaccagaagtgatgtaaatagttcccaccttgtggaaggacaagaaaaaaataaataaaaagagtgcttgctttcgttcctt

SEQ ID NO: 59 - DNA, 1519 bp, Zea mays
ccacgcgtccggagagaatcctaccaaacctagctaccaactcgatcgtcgtcatcacgctcgaccgcacaactgcaccaaggggggaggagacctaaaaactactacatcttttagctacacatctagctaaagatcgagaggggtaaataaggacgagcgggcgcgagctagaagagcagctgcaggtactaccatcatcgtcgtcgtcgtcgccaggatgaccgtcgtcgacgccgtcgtctcctccaccgatgccggcgcccctgctgccgccgccaccgcggtaccggcggggaacgggcagaccgtgtgcgtgaccggcgcggccgggtacatcgcctcgtggttggtgaagctgctgctcgagaagggatacactgtgaagggcaccgtcaggaacccagatgacccgaagaacgcgcacctcaaggcgctggacggcgccgccgagcggctgatcctctgcaaggccgatctgctggactacgacgccatctgccgcgccgtgcagggctgccagggcgtcttccacaccgcctcccccgtcaccgacgacccggagcaaatggtggagccggcggtgcgcggcaccgagtacgtgatcaacgcggcggcggaggccggcacggtgcggcgggtggtgttcacgtcgtccatcggcgccgtgaccatggaccccaagcgcgggcccgacgtcgtggtcgacgagtcgtgctggagcgacctcgagttctgcgagaaaaccaggaactggtactgctacggcaaggcggtggcggagcaggcggcgtgggagacggcccggcggcggggcgtggacctggtggtggtgaaccccgtgctggtggtgggccccctgctgcaggcgacggtgaacgccagcatcgcgcacatcctcaagtacctggacggctcggcccgcaccttcgccaacgccgtgcaggcgtacgtggacgtgcgcgacgtggccgacgcgcacctccgcgtcttcgagagcccccgcgcgtccggccgccacctctgcgccgagcgcgtcctccaccgcgaggacgtcgtccgcatcctcgccaagctcttccccgagtaccccgtcccagccaggtgctccgacgaggtgaatccgcggaagcagccgtacaagttctccaaccagaagctccgggacctggggctgcagttccggccggtcagccagtcgctttacgacacggtgaagaacctccaggagaagggacacctgccggtgctcggagagcggacgacgacggaggccgccgacaaggatgcccccacggccgagatgcagcagggagggatcgccatccgtgcctgagagggcgatgccacacatgaacacaaagcaatgttcatactgctgccctgcacctgctgtgtaaacaggcctgtgtttgttctggctgatagtgatgtaccctaagacttgtaacgtcatgttcgttcttgtgaactatagcgagtgaataaaattggttaatgttggatgttcaaaaaaacc

SEQ ID NO: 60 - DNA, 1285 bp, Zea mays
gcaggtcgatgatgaggagcggcgacacgtcgtgacggacgttactttcgcgccgtattctagtcttctagagatatccatccagttctcgctgtatctttttctccccaagaaaaaaaaggcggcgagagcataagaaaaaaacacacacacacacacacacaaagcgcacttttcaaatcgacaaaggggaaaggttcgcttcttctcgcatcttgctttacttcgagtgccatggccgatccggcggaggagaacgttgtctcgccgccaccgacccctgcggccccagccgtgggcgcctcagactcgcccctgcagcctgttgctgacggcgcctcaacggagaaggtgtctgccccggcgccggaggtaaggtcccggggattcaggcttcttggagaggacacttccgtgcacaaatcccttgggggcggtaaaactgctgacgttctgttatggaaagacaagaaaacttctgctgttgtaataggcggcgcaactgtcatctgggttctgttcgaagtgcttgattaccacctcctgaccctgatatcccatgtactgattggtgtgcttgccaccttattcctgtggtccaaagcaaccacgttcatcaagaagagtccaccggatattccagtagtgcaggtatctgaggaccttgttgtgaatgtttcacgggcattacggaatgacatcaacagagcgcttcacttgttccgtgagatcgcaatggggcatgatctgaagaagtttttgggtgtgatcgtgggtctgtgggttctctccggagttggaagcagctgtgacttcctcacgttgacatacattgccgtcctgatgctccacacggtgccaatcttgtacgacaagtaccaggacaaggtggaccatgtcgctggaagggcacacaccgaggccctcaagcagtacaaggtgctggatgccaaggtcctgagcaaaatccccaggggtgcggtcaaatccaaaaagcagaactagttaggataagccgcagattgtgaatgcccgtatcatgagtatcgggcttgtggtttgcatggcatatgtaaatctgtctgttggcttcagcttggttcttctgcgactactttgttgatgttattatagtcctatgtatgtactgtgtacatgacagatgttcggacgtctcggctactgctgtagcttgtaaattccagtggtgcgttgctaagcacgatgctccccttgttttatgtggtgttggactaatgattactacactaaggtttaatgactc

SEQ ID NO: 61 - DNA, 1120 bp, Zea mays
gcacgagggaagaaatgagcaagttggaagcattgcttctagacaagaaccgtaaaatggagcatgagctaacacaactgaaggttaaaatatcagagaaaacaagtgttcttgaggaagctgaaaaaaggattgttgaactaacttcaaaggttgaagagcagcaaaagctgattttgaaacttgaggatgacatactaaagggctacagttcaactgataggaggggctcactcttgaatgactgggatattcaagaaatcggctcaagtgaagcatccgagggctctgatccaaggcatgcatcggcagatcaagatcaaagttcgatgctcaaggtcatttgcaaccagagggatcgtttccgtgcacgtctgcgtgaaactgaggaggaactgaggagactaaaagagaagcatgagatgctgactgttgaactggaaaaaactaaagctgataatgtgcaactgtatggaaagattcgatatgtccaagactatagccacgacaagattgtttccaggggaccaaaaaagtacgcagaagatattgaaagtggttcttctgatgttgaagcaaagtacaagaaaatgtatgaggatgacataaacccgtttgctgctttttcaaagaaggaaaaggatcagcgttataaggaacttggtttaagagacaaaatcacacttagtagtggccgttttgtccttggtaacaaatacgcacggacgtttatattcttctacagcatcggattgcatctccttgtatttacattactgtacagaatgtcagctttgagctatctcaacacaacaactcagcaggatgaaatcattctggatgctggtaatcagaggctaacgcacatgctttaggccaagttccatataacagtagaaaaagaggctctctgggttttgatctatagaatctttggacaggatcgttgctgagattgctattgatttgtttgctttgtacccttgatatgtttctgtagataaaaagaaaaaaaccctgttttgggggcaggcgtgggtgcggcatgggctttaaactatgtaatactgttgtactgccaatttaccattttgttggtaaatgaaagcacacttgtcac

SEQ ID NO: 62 - DNA, 1661 bp, Zea mays
  misc_feature (1638)..(1638): n is a, c, g, or t
gcgggcacccctgtacctcttccccccgtttcatcccttcacacccaccccccacctggtctgtcatcccctttgctacgctccccttgccctgtcccctcgccgcccgcgcccgtggagttcttcgatcgagtcctcggagcccggagcacctggtgcaacaatccggacccgcgcgaggaagggcggagagagagccgaatctgagcctcggcacaagttgggcacccgtcaagattctcggcccgatctgctgcggaacatggagctggacagcatcgagtgcatgtcctactccgacagcatgggggacgacgacaccgacgccgtcacctcgtcccagctccctcgccccttcctcaaatcctcctccaccgccggtactgccgccgtcaacgtggtcgtcgtctccgaccgcgtcggtgccgccgggccggtagcgggagcgggttcgctggtgatttcgccagccacgggcgtgcacgagctgctcgagtgccccgtctgcaccaattccatgtacccgcctatccaccagtgccaaaatggtcatactctatgttccacctgcaaaactcgggtgcacaaccgctgcccaacttgtcgacaagagctaggtgacatcaggtgtctggcattagagaaggtggctgaatcacttgagctcccctgcaaatactactctcttggatgttcagaagtcttcccatactacagcaaactcaagcatgaatcacagtgtaattttaggccatacaactgcccttatgctggttctgaatgctcagttgttggggatatttcttttcttgtggcacatctgcgagatgatcataaagtggacatgcactctggatgtacatttaatcaccgctatgtcaagtccaatccaagagaggttgaaaatgcaacttggatgctaactgtttttcattgttttgggcagtacttttgcttgcactttgaggcatttcagcttggaatggcaccagtatacatggctttcctccggtttatgggcgatgaaaatgatgctaggaactacagctatagccttgaggttggtgcaaatggcaggaagatgatatgggagggaactccccgcagcatccgggacagccaccggaaggttagggacagccatgatggtctaataattcagcgcaacatggctctcttcttctcaggtggagaaaggaaagagctgaaactgcgagtcacaggccgtatctggaaggagcagcagaatcctgactcaggagcctgcattcccaatttgttcagctgagctcagtaacaagaggatggatccaggtgtatattgatacggccgatgtgtttgtgtgagcgtgtgcctgtgctttgcgttttgtcctgccaagctgccattgcagcccgccctaaattagtcagggcgtatttactgttggcaggataatgaaaatactggcttactccttttgtgggctgtgactaagctcccatgaatctcacgataagcatttttctcgatccaatggtgtatactgtatcgttttgggctgaaggctgcagcttttttgctgttatgtttgtctcggtgtatttgtgtgtctgcaaataaagtattgaacagtaactgggtaccttgcataaggnttgggttggctgttcacttgcct

SEQ ID NO: 63 - DNA, 1532 bp, Zea mays
tggatcccccgggctgcagggcgtggccagcgctgatttcgagggggtcgggctgtgtttcttcggcgccgtagcaggcgcggagggtggtcccatggtgttggaggactcgaccgcgtctgcagccacggtcgaggcggaggccagggtcgcggctggtgggaggagtgtcttcgccgtggactgcgtgccgctgtggggctacacttccatatgcggccgccgtccggagatggaggatgccgttgctatagtgccgcgattctttgacttgccactctggttgctcaccggcaatgcgatggtcgatggcctcgatcccatgacgttccgcttacctgcacatttctttggtgtctatgacggacacggtggtgcacaggtagcaaattactgtcgggaacgcctccatgtggccctactggagcagctgagcaggatagaggagactgcgtgtgcagctaacttgggagacatggagttcaagaaacagtgggaaaaggtctttgtggattcttatgctagagtggatgacgaggttgggggaaacacgatgaggggaggtggtgaagaagcaggcacaagtgatgctgctatgacactcgtgccagaacctgtggcacctgagacggtgggttcgacggcggtcgtcgctgtcatctgctcctcacatatcattgtctccaactgtggagattcacgggcagtgctctgccgaggcaagcagcctgtgcctctgtcggtggatcataaacctaacagggaggatgagtatgcaaggattgaggcagagggtggcaaggtcatacaatggaacggttatcgagttttcggtgttcttgcaatgtcgcgatcaattggtgacagatatctgaagccatggataattccagtcccagaggtaacaatagttccgcgggctaaggatgacgagtgccttattcttgccagtgacggcctctgggatgtaatgtcaaatgaagaggtatgtgaaatcgctcgcaagcggatacttctgtggcacaaaaagaacagcacaagctcatcatcagccccacgggttggtgactccgcagactcagccgctcaagcggctgctgaatgcttgtcaaagcttgctcttcagaaggggagcaaagacaacattactgtcgtggtagttgatctgaaagcacagcgcaagttcaagagcaaaacttaaccgtgacaagcgtagcaacaagttgctaggaacctatagattcggacagtcccaagttcggtcattttagttcgctgctttagtgcattgcttagcccagttccttatttttctcagttctttttaagccatgccaagggctgtattccccgtatacggtacagatcgcgaaatccctatcagggatggtttggtgatatcagggtttatatgttttcctgaccgtggtgactgtcctgttttcattcttctttcttcgctgccctgtattcattttgtcaagctggggcaggcatccaattatttggcaatgtatatttgagcttgcggg

SEQ ID NO: 64 - DNA, 1042 bp, Zea mays
ctgagagtcattgcctctcctacacaggacaaccaaggctgacccctctcctgcttccttcagcgaggcttcgagcgcgggcagcttctcttccagcatggagagcgggatgttgtgggacggagagatcgaagctatctggaagtgatgcgcaggccgtacgtccaacagtagatgaggttcaccatcgtcggccaatttcttgtactctctgcaagtgatccgcgcgctctctgggagtacgttcacgcttggtgctgccttatcagacattggtgactgtgtgaagctctcatagtcaaacttctgaaagtcttcttctgtgaaaacggagttttcgccacaatgggtgcaatctggagagcttccacgaagtttaacctgcaagttgtacgtagacatggtaatgagatgtatcaagacagtcctatagttatgcgtccaagaaatgcaagcaacttcgaaggatcagaagatgttaatagttttgcaggtacattgatggccacaatccacttgatggcagaccacctgcaaataggatgaatgctcgaacatggtttcaaatgccattggccactgcagatcacagtaagttcttggtgaagaaaccaaacaagatcatgcggaagctttggtgtctgcttcacaattatattatttttgacgttagaaggtttgtaacactaactactgatgctgggaataggttagttagcagctctctgcgaaggtctggatggctgtcataggaagaggaataatttcgttggaaaacgggtagatggggatcaattgttcactagacatgaggagagggtgttatttgacttctataatgtgctacttgggaccatcatgatcatcatcaacaaagccttttatcccaagcaaattagggtagactatagttagaaacccaatagaatccacaagcaaagattcagacacatggatagttgttttccatgcacttgggaccagtataaagtgcaaatttactattaatcttgatgagctagatattgatctcgccagaaag

SEQ ID NO: 65 - DNA, 800 bp, Zea mays
ggcgtttaaagtaattctgtatctcaaatttaatcttgtccatggcattatccatgacaataccgtgtccataccagttgtatatatatatatttttttgcaagtacacggtatggcaaaattagtacccaaatcatagtaccagagttctcgttcttgcaacaccaccagaatctctggcggcattcaaactgttacaaggtgtagtgcatccatttccatctcgctagtacacagggaaatcaggatcgacgtctcgtccccacgcctgcagcccaccgatgatatccttcgcggaggcgaatcccttctcgcggagaagctggacggctctctgagagtcattacctctcctacacaggacaaccaaggctgacccctctcctgcttccttcagcgaggcttcgagcgcgggcagcttctcttccagcatggagagcgggatgttgtgggacggaaagatcgaagctatctggaagtgatgcgcaggccgtacgtccaacagtagatgaggttcaccatcgtcggccagtttcttgtactctctgcaagtgatccgcgcgctctctgggagtacgttcacgcttggtgctgccttatcagacattggtgactgtgtgaagctctcatagtcaaacttctgaaagtcttcttctgtgaaaacggagttttcgccacaatgggtgcaatctggagagcttccacgaagtttaacaactctaatacgagcagagagtgcatcaaatagtagcattcttccgcataggggctcaccaacaccagttgcaacctttatagcc

SEQ ID NO: 66 - DNA, 1870 bp, Zea mays
cgcctccacggccaagcgcctcgaaggcaaagcttccactagccacaggccaacgaaatcgcaaagcgaagctacggccaccgaccgacgttccaagaagcgaaacgaaacgaaaatgatgatgatgatgggagagagagcgcacgcgcctccgtggcagcgctcgccggcggccagcggcgtcacggacgcggacgacgcgtctccgtacgccctcctagcggcgctgcagcattacctgccgtcgaacgaggtggcggcgtacgacgaagacgacgaggaggcggccctggcggcggcgaccgccgccgtcgacgcgtacgcctgcgacgagttccggatgtacgagttcaaggtgcggcggtgctcgcgcgggcggaaccacgactggacggcctgcccctacgcgcacccgggggagaaggcccggcggcgcgaccccaggcggtaccactactccggcgccgcgtgcccggacttccgcaagggcgggtgcaagcgcggcgacgcgtgcgagttcgcgcacggggtgttcgagtgctggctccacccgtcgcgctaccggacgcagccctgcaaggacggcaccggctgccgccgccgcgtctgcttcttcgcgcacacgccggaccagctccgcgtgccgccgccgcggcagtccagccctaggggcgcggcggcggcggcgtcgccgctggccgagtcgtacgacggctcgccgctccgccgccaggcgttcgagagctacctcaccaagagcggcatcgtgtcgtcgccgccgccgaccagcacgctcgtctcgccgccgaggtcgccgccgtcggagtccccgccaatgtcgccagacgccgccgccgcgctccgccgcggctcgtggccgggcgtagggtcgcccgtcaacgaggtcctcgcgtcgatgcgccagctgcggctcggcggcggctcgccgaggtcggcgccttccggcgggtcgttcttgggcggaggctacccgttcgggtccccaaagtcaccggccgggctgtacagcctcccgtccacgccaaccaggccgtccccggtgaccgtgaccaccgcctccggcgccaccgtcctcaccgtggaacgcctcaacctcggactcatcggggacgaggagccggtgatggagagggtcgagtccgggagagccctccgcgagaaggtgttcgagcggctcagcaaagaagccgccgttcccagcgacaccgccgcatccgccaacgttgagggagcggcccccgccccggatgttggatgggtctccgacctcatcaactgagggaactcgtggaactaccagctcagaagttcaggggggaataacaaaaaaaaagtaggaagatttttaattttttagttctttacaaatattttcctggtccttgtacagatgttcctgctttgtgaatagtcttggatggttgtcgaagggaggggaggcagggaatggttgatttgttatgaggtttcagatgatggcatgtcggtgaaggagacaaggtgcccagcaaaccatggtggaaaatggatcaagaagacatgtgcaggcgaccatgtatacgggttgtctagatgcacatggtgtcttccctgcctgtgaggtgggagcatgggaggcgatcatggcggcgatccaagaccgaacccataatttccgcgagcgattccagaacgaacggcgtcttgagttgatgttcattctgctatttgccttttaagattcgacgagttattactgctctgtgatttttctcaaagtatttccatattgatctatgcatgcatgtacaatgtcagtactgctactttcgctgatactccgtaacaaaattaattaaaccggcgtgct

SEQ ID NO: 67 - DNA, 1779 bp, Zea mays
ccacgcttcttccagaagcatgggtctggaccacagaacggtgcgcagtatggtgcaccatacatggaagaggaatgggaagaagatgatgatgctattgagaatggttctacccacggcgcatctggtcaaattcctgcaaccacctgtgctgtagatgaggagtcaaatgaggacgatgagaatgcatattgtgaaacaaacagacctgctcgagtagaaccatctcatctgccttcggtccatgaaatgctcaatccaccagagatggctcctctccaaggtcaagattctaaagagacaagcgatggaagttgttctgatgttgctatttctctggaagagattttgcaggaacctttgtcaaatattagtgtggagaatatgcatagacttgaagggcagaatgccactgatgataacatcagtgttgataacttgttatcagcatatcccacgaaagataatggctacgtaggccagtataacactatgaatgggagtgctccagcagatgaagctcacgcacgctggcctttgagaacatatagtaatcagaattatgtcaatggccctcttgctgatgagttctttgacacagggaatgataccaatggggttgcatattccaggcagcagcaagctgatggcttcccagcacctcgccaagttgatgaaagtatggtattttatgatgccccatctgattacaacttggtggatggaaaagatgacttcgtatatctgaacgacattctgaatgagccacttggaaatgaatcgctctttgatggagatgatatgatggcttactttgatgccacagagaatgatttcaagtatgacattttgggctctggtcagggtttggattatccacttgcagacatgccgttgaactttgcccaaaagagtgacaaggaagacaagtttacattcgaagggatctctgaggttccggaagcaaatcctcagtacggtgcatcctcatctggttcacatgaagatctgtatactgatactgaatttctaggtgtgccaacagatgacactgctgataaaacttacggaaatcgcctggccagcatgttaggctctatcccagctccacctgcaatggcctcagaattcccgccgtcaacagggaaatctgctgggatgctttcggctgtcagctcgagctcaattcgttttactgctggtatcatccaacttgatggcctcactttcagcagcggctccggtcagtggcccttgcagaagaatggagacttgagtttgcttgtctcttttgctgtggagggcgacgtggcatccaagctccctgttggtcttgggcgtgctactcggattagcaccgttcccatggtgctgcgcagtggtttttaccttttctttatgtcggccatgattctcttgtttagctacaaagtagggtcgtgtatctacagcaggtaagttgaagttgatggcgcctcttgtccggccagacctgtgggctgtttattttagttcaacacgtggatcattccctcagtgatgggggtatagcagtcgttcgacaccttttttacacatttaccattttgacctgtcaaaacatacagcaataaactttcgaactggtggtggtgatcatgcgcgggaccatgttctcgtcagggaaagcagtgcactgcgaatttggtgctctgctcttattattgtaaccaaaattaactgcaatatgttatattctgtcctgtagaggaaaagctattttatctggttattgtaacc

SEQ ID NO: 68 - DNA, 1551 bp, Zea mays
cccgtgccccgtccatttcccatccccaacctctctctctcccccctaggagtgggagctcctggctccatctatccgcctgcagatatcacaagcttttcctgctgctgctgctgcagcagcacctgcagcttctccgtctgcagtgcgagcagctgctaaaaattcccccataagcctctggcttcctgcccccctcactttcttggaagcccagcacaacacgaggatcatattcactccctacagtggcgtactagaataccagttgtgcgcaaacagcggcagcagccgtgatgtacaggtgagctggctctgccgctccactccatggaggatctgtacagcatccacccggggatctcgcgggtcgtcggaggcgcggcgagcgaggcgtccgtcgccggcgccggcgccggcgggccctcgccgtcggatctgacggagctcatgaaggcgcagatcgccagccaccctcgctacccgtccctcctctccgcctacatcgagtgccgcaaggtgggagcgcatccgcatgtgacgtcgctgctggaggaggtcagccgggagaggcgccccgacgccggcgccggggagatcggcgtcgatcctgagctcgacgaattcatggacgcttactgccgggtgctggtgcgctacaaggaggagctgacccggccgttcgacgaggccgcgtcgttcctgagcagcattcaggcgcagctcagcgacctctgcagcggtggaagctcgccggcggctaccgccacgcactccgatgacatgatgggctcctctgaggatgagcaatgctcaggggacactgatgtgccagacatggggcaagaacatagctctcacttaggtgaccacgagctcaaggagatgcttcttaagaagtacagtggatgcctcagccgtcttcgttcagagttcctgaagaagcggaagaaagggaagctaccgaaggatgctcggacggtgttactagagtggtggaacacgcactaccgctggccttatcctacggaggaagacaaggtgaggctcgcagcaatgaccggtctcgacccgaagcagatcaacaactggttcatcaaccagaggaagaggcattggaagccatctgaggacatgcggttcgcgctcatggagggtgttgccggtgggtcttctgggacgacactctacttcgatacaggcacaattggaccctgaatcatacaccacttgggatgacaactggccagctcatattagtaataagatctggcatgtggagtgacgatctgctcggtgaaaattgaaaataaatctgctgagctgaggttgatcagactagtcagttgccctattattttacaagatcatgtgtatatggtgccgtcgtatcagaacaaactgtatgcatgtatgggcgaattgagacctgcaaaaggagtttaattagtagtttcaagtattggctcatggatttgtaatactcgctacccaatttaattgttagataggctgaagggcttataaaggtaaatttacttctgctcttcc

SEQ ID NO: 69 - DNA, 1319 bp, Zea mays
acgattccaactgccaggatcactgaccgttgctgggcgctggcctataagtacctggcctccgcgccccactcccttcacagccaagctagcaactctctcgagtcgattcctaagcagctagccagtgactcgatcttagcgtgctacaatggcggcagctgctagtgccctgctcctcctgctctgctcagccttctgctcccttgcccaccgggcggccggcgtcgactacggctcgtggcagagcgcccacgccacgttctacggcggcggcgacgcgtctggcacgatgggcggcgcgtgcggctacgggaacatgtacagcacggggtacggcaccaacacggcggcgctgagcacggcgctgttcaacgacggcgccgcgtgcgggtcctgctacgagctgcgctgcgacaacaacgggcagtcgtgcctgccgggcaccatcaccgtcacggccaccaacttctgcccgcccaactacggcctccccagcgacgacggcggctggtgcaacccgccgcgcccgcacttcgacatggcccagccggccttcctccagatcgcgcagtaccgcgccggcatcgtgcccgtcgcctacaggagggtgccgtgcgtgaagaagggcgggatcaggttcaccatcaacggccactcctacttcaacctggtgctggtgaccaacgtggccggcgccggggacgtgcagtccgtgtccatcaagggctccagcaccgggtggcagcccatgtcccgcaactggggccagaactggcagagcaactcgctcctcgacggccagagcctgtccttccaggtcaccgccagcgacggcgtcgctccggcgggctggcagttcggccagaccttcgagggcgcccagttctagctactactactccatcgacgagtgtgactgtgagcaagagagaaggagaaaccttcttcgctgtagtaaagaagaggctcccgccattccgaggctgcttattattagcacccgcttaggcatttccttctcttattattaccataggattgagctgtttattttctgcaccagtgattgtagcaatgggttaagcaaaacaaaaacctgcaaggctgattattgtagggctgcaggggagtggtgtcgtgcaacttattgtgttgttacgctgtactagcagcaacccccgaatctggccacatggtggtgggagatgtttgtggggattgcaccttttgggaccgtgaacatcaatgcttgtttatggtttattacatgcagtatatatgatatatatatgctcgtggtttgatcctcggtttgt

SEQ ID NO: 70 - DNA, 1569 bp, Zea mays
cccgggattcggccttatggccggggagcggagggggcggtaaaacatttcttgtttgtttattgcgccggaaaaaactaacagacccagaaaaggacagaaagaggctgtacagtaggcgcgtatatttggcagtaggagcggtcttgttgtgccccgtatcactcctcagttgcttcgacgtatttctctctctatctatacgattccgaagaaggtagagagagaaactcgaaggggagaggacagaagagggagatacaggttaatttttaggtaccagatcatctgatttctcagaagcaaaatgttgtttggagctcagtgacaccatcttgtaatgcctgtgattttacgggaaatggaggatcattctgtccatcccatgtctaagtctaaccatggctccttgtcaggaaatggttatgagatgaaacattcaggccataaagtttgcgatagggattcatcatcggagtctgatcggtctcaccaagaagcatcagcagcaagtgaaagcagtccaaatgaacacacatcaactcaatcagacaatgatgaagatcatgggaaagataatcaggacacaatgaagccagtattgtccttggggaaggaaggctctgcctttttggccccaaaattacattacagcccatcttttgcttgtattccttatactgctgatgcttattatagtggggttggggtcttgacaggatatgctccacatgccattgtccatccccagcaaaatgatacaacgaacactccgggtatgttacctgtggaacctgcagaagaaccaatatatgttaatgcaaaacaataccatgcaatccttaggaggaggcaaacacgtgctaaattggaggcccagaacaagatggtgaaaaatcggaagccatatcttcatgagtcccgacatcgtcatgccatgaaacgggctcgtggatcaggaggacggttcctcaacacaaagcagctccaggagcagaaccagcagtatcaggcatcgagtggttcattgtgctcaaagatcattggcaacagcataatctcccaaagtggccccacctgcacgccctcttctggcactgcaggtgcttcaacagcctgccaggaccgcagctgcttgccctcagttggcttccgccccacgacgaacttcagtgaccaaggtcgaggaggcttgaagctggccgtgatcggcatgcagcagcgtgtttccaccataaggtgaagagaagtgggcacaacaccattcccaggcacactgcctgtggcaactcatccttggctcttgaaactttgaatatgcaatcgacatgtagcttgagatcctcagaataaaccaaaccttcagttatatgcaagccttttttgaggttgctgttgctgtacctgagaactgtggttaggttatgagtttgttcctgaagactgacccatacatgacatgctaccttgtgctgagtttctgagacaaagccatcgaaacatgatcttgtggttccagtactttgctgccattagtgtctgataaactagctccccagtttgcagtta

SEQ ID NO: 71 - DNA, 1616 bp, Zea mays
cgatagaaatatcagatatgccattgtcctgccaagtgaacgggagtcgggagttgagtatcgaacagcagaataatcagttggaaatacagacagttgactttcaccgctccctcaatattgtcctaataatattaaccaacagcctaagaaatacagtacaaaagagtcacgcctatcatacatcgaatgttctcaatatagacgaagctgctggccagcctacaacaatttcagagtttaacgtgactactgggaagggcaaaatcatctgcgcgatgaaacccagctgcgcccaccagcactggctgtagtcttcgggggaggaaacatgcttatgtcggttggggcagcgggttggtcttcaaccacaaggaccgccctagcatggctctaccatgaacagccatgtatgaagcattcaacttgtcaacatcaggtatgttcattggatcatatggctcctccttttgctccatgcctggatggctaccagcaacagaagtggcgtcaacagttccctcaacctgttggggatattggctatatcctgcataagcaccataagcgtatgacggatcctgagcatatccatatgcatcatacccatagccatagtaagtgtttgcccactgatttggatctgcttgctgactccacacagctgatgaatcctgtttactcgcaggacttcggccccatgaaagccgaacagcttgttggccaatcattgtgccatgaagacgttgtactgcctcttcagctgatgccctagatgcatactgtacaaaaccacatcctttaccaacaggaattttcacatatataagttctccaaactgtacacatatctgcctcagctcatcttctatcacatttgggtccaaattcccaataaatatcgtagtgtttgtaggatcactgtcagggagaactgcctggagctgaggcattgcatacgctgttgctggatacaccgctttagcagctgaatactgaagctgagagccagtggatttcttaggtattgcagcacttatccgcataggtctcgttgaacagtacacaccattcatttctgtcattgcacggttcttttcattttcatctgcgaactttacaaatccatatcctttagatctcccggtatttggatccgtgacaaccttagcacctctaacagatgaatagttcactcggaatgtttcctgtagtaagtaatctgtgacatcaggtgccaggtcccctacgaaaatcgaatgatcagatcctggatcagggcgcctctcaccagagctgaaagaggcccaattcaatctgaatgaaaaaaagttccaggcatctgtgtgccattgtaagtctggagaattttctcagcagcttcatgtgaaacaaactctataaacccataaccctcaggaaggcttgttactttgttgcgtattattttaacagattgtacctccccggtgtgagcgaagcagctgtagaggtagttctcgtcggtccagtactggaggtcgccgagccaaaaagtgcggacctcctccaggctcgtaggctggtgatacggcgccgccttttgcaaaagtgaggccggacgcgcgagctgaacg

SEQ ID NO: 72 - DNA, 1248 bp, Zea mays
tttcgggacaccatatgctgcagtatacccacatggtggagcttacccacacccccttgtgcccatgatgtcaacttcaatgagcgtggagccagccaaatctgcgaatagcaaggagaaaaattccaataagaaacttaaggaaatagatcggactgcagtgtctgctggcagtggtaacagtaaaagaacagtgtcatccattgaagattacagtgcagaaggctcaagcgatgtaaacgatcagaatgtgaacgaaacgtccaggaagcggagctcagatggtggacctggcgcagaaaccaccacaggtggaaacacggaatgtgttttagctcctaaccatacgctggggaatgctaccattttgccacaacactgcttttcagctccagtaattaagcccagtgctacaaatgtcgcgaactcgagggcgataggcacggcattatctccaccacctggtgtgatggttccagttcataatgcagtaccatctgacttatcagttaaggatgagagggaattgaagcgcgaaaagaggaagcagtcaaatagggagtccgctagacgatcaaggctgagaaaacaggctgagacagaggagttggctacacaagtggagtctcttgcagcagagaacacgtcccttagatctgaaatcggccggttaacagagagctcagagaagctcagactagagaactcagctctaatggtgaagctgaaggacaccgcagaaccgtctcccagcaaagcagccgcatccccatcctctccccgtgcctcggcggagaacttcctttccatgatcgacagcgccaacgcgccgagcgtcagcaggcacacggagcacggcggtcccaggctccggcagctcctggactccagttccgcgacagacgtcgccgccgtaagctgatgatgaagccggtccggcaaatacgccacagcacatgcatgtggcctggggattccgcaggctcatgcggctcgagtgctcgccgtaaacgtcagcgttacggactcggactctgtactccagtttaggcactgattccaccgagggtaccggtaattttatctgctctcgcgccagagtgccgggctgcctgcgaccactcctgtgtacccagagttgtaacgtagtagggtgttgtgctgcatgccgaccttttgaaacttttcgagaccgtcatttgcaccattttttcgtcgcaataagacaatacagatcggagtttgtac

SEQ ID NO: 73 - DNA, 690 bp, Zea mays
aagaagatcatgaaggccgatgaagatgttcgcatgatctcagctgaagctcctgtagtctttgcaaaagcttgtgagatattcatactggagctgacacttaggtcgtggatgcacactgaggtgaacaagcgccgcaccttgcaaaagaatgacattgcagcagcgatcactaggactgacatttatgacttcttggtcgacattgttcccagggatgagatgaaggaggacggaattgggcttcctagggctggtctgccacccatgggagccccagctgatgcatatccatactactacatgccacagcagcaggtgcctggttctggaatggtttatggtgcccagcaagggcacccagtgacttatttgtggcaggagcctcagcaacagcaggagcaagctcctgaagagcagcaatctgcatgaaagtggctgagaatattgctcagaagctatcacctgattcagagttctcattttaggttgtccaaattgcaggttttcttagtaatatcgttggttatcaaactgaaacaggcgattctaagtagggtgtagcatcatggtagtttcatttctgcttgtgatgttagttgaaaggataatgattagtggctagtggattaaagttaccataccatttccttctattccgaaagtttgcctccatgaggcctctatagt

SEQ ID NO: 74 - DNA, 1120 bp, Zea mays
ttttgatcttacaactaaagcagctcttctcataattcaatagtcaatacactagtcataacacaaattacacgatacttatgcctccaaatacaaatacatgtaaccaaatggcagccaaaagaccaatcgttaaggtatctcaatatacatacagtagcggcgctaaccaacaatcgttcccaggaaaagcgatttactcctaccaagcggcctcatcagttcttgcagataaaaattgacctacccagggtgattggttactctttaatggtcaccgcaaggtgtcttacttagtaaataactgcgaccaaaaacccgcctcggggaagagcagctgttgcagaaaaggtccatgtcttcattagttcgagatatctccgttatggtactgaggttgcatataacccattccttggttgtatgttccttgctgacccatcccttgtacagctgagctacttgctcccacatgaccaagggcatcctttttaatggagccatcgctggattttgaagttaacttactatcaccctccatctctctgtacttctgcaggtacaccttgaggggttcaatatagtcctcaaaccccagcgtggccatggcccacagcaggtcgtcgccattgatggtcttccgcttctccctctggcacttgtcactcgcctcgctagtgatgaaggagatgaactccgagacgcactcctgcacggtctccttagcgtccttggcgatcttcccgttagccgggatggccttcttcatgatgcgactgatgttggcgatgggcaggaacctgtcctgctccctgacgctgccaccgcctccacctccgccgcccctggggctcccgctctcgtggctcccgcctccgcccccagggctcgccggagcgtccgccatgagctcctcctgcacttatataagcgcgggcgcgagcaacgtggagggaggggagagcaggtggcgagcgaccgagcgcggggggaggacggaggtggcgaagcgaccgagccgggagagctgcggtgaggaaggcgagtgggagagatcggggaaggagaagagcggacgcccggtttcgaaagattccggaccgtactgcagggtaccagt

SEQ ID NO: 75 - DNA, 1036 bp, Zea mays
atggacgcctgcggtacggtccggattccttctacaaagaggcgtccgcatcgatccgccattgctcaccgcacaagtgcacgctcacctcacacacgcagctaagtagctaacgccgtaggcgagaacaagaaaaggctcgacatggccgaggagaagaagcagggcctgcagctgctggacttctgggtgagcccattcgggcagcgctgccgcatcgcgctggacgagaagggcctggcctacgagtacctggagcaggacctgaggaacaagagcgagctgctcctccgcgccaacccggtgcacaagaagatccccgtgctgctgcacgacggccgccccgtctgcgagtccctcgtcatcgtgcagtacctcgacgaggcgttcccggaggcggcgccggcgctgctccccgccgacccctacgcgcgcgcgcaggcccgcttctgggcggactacgtcgacaagaagctgtacgactgcggcacccggctgtggaagctcaagggggacggccaggcgcaggcgcgcgccgagatggtcgagatcctccgcacgctggagggcgcgctcggcgacgggcccttcttcggtggcgacgccctcggcttcgtcgacgtcgcgctcgtgcccttcacgtcctggttcctcgcctacgaccgcttcggcggcgtcagcgtggagaaggagtgcccgaggctggccgcctgggccaagcgctgcgccgagcgccccagcgtcgccaagaacctctacccgcccgagaaggtctacgacttcgtctgcgggatgaagaagaggctgggcatcgagtagagcatccatcggtcggccggtggctggccgggagtaataatgacgaaccataatctagttttggttttagtgtgctcagcagagcagttcgtgttcatgagttcgtcgtcgttgtattttctattgtcagcggtggcagcgccgtacgtggtgcctcgtacaccacaaccgaataagggggtgtttggtttgcccctcctaaaatttagcccctatc

SEQ ID NO: 76 - DNA, 2387 bp, Zea mays; identical to SEQ ID NO: 55

SEQ ID NO: 77 - DNA, 911 bp, Zea mays
agaaatgtgacgtcttcagctatggggtcatattatgggagctctgtacattgctgcagccatgggaaggtatgaatcccatgcaggttgttggagctgttggttttcagcaacgacggcttgatattcctggtggtgtggatcctgctgtagcagagataataaggagatgctggcagactgatccaaggatgcggccatcattttcagagatcatggctactttgagaccattgttaaaaaacatgcctgccaaccaacctaccaggaagcgggcacagcaaacagatgattaagaatatattggtcagtatcagctgaagacacaggccaaagagagactgcattggtttgtcttgctcttgccttcccagcttcaagcaattggccatctgtaactattaccattgttttgtacagtacgccaaatgcgtatttgatgaagaacaggtgaattttggtccttttgccttcagcgtttggttctccattggagccagcggaatgctgtctatatctatctgatgaaagccgacccaaataacacagatccatgaagccaaagaaaagaaagggaaaagaaaatttgcgaaagttcgtgcatactatttttgcagacacaatggttactggagtcagaagttgacatgtcatgttgtaacaggatcatcgtcttctgttcagttaggccttatttttgctagtcctcgaactaatggaaaactattccatctttaaggccccatcaaattgtaatgttttacttttgaaaaggttggctccccccttgtgtatatcacgtctcaacaaatctgcttttaattgacaggtagattacaaaagaaaattatgccctttgtactaagaatgatcattctttgcggtaggaaaaatgttaaacctacttttgc

SEQ ID NO: 78 - DNA, 1900 bp, Zea mays
ccgaggacagcacacagtattgtgggaactgcatgctgagagcaaacccagaaaggaaaaaggaaaaaaagaaaacagagagaggggagagtgggagacggtcggagacagaggcctcactcctccacactctcagtcgtcttccagtcccagcgctttcttggatcgcgaggaaaccactcggggagtttgcagttgcagagaactgtatcggccgaagtggttgcacggtgtgttggccttggccatgcgccacggcagggaacagagacgagcagcagggaggcagcaatggaggcgctcattgaccctgctctcgctgtaaagatagtcccgcggtgccctccgaattccacttgatccaactctcgacatgaagcggccacgcggcgctactccctccctgtctgcgatgcccaatcatcaggaagatgacggctacggcgtgctcgggatggaggcggacgtggacgtggacgtggacgaggagatgatggcgttcggcggcggcggcggcggggagaagaagcggcgcctgagcgccgagcaggtgcgcgcgctggagcggagcttcgaggtggagaacaagctggagccggagcgcaaggcgcggctggcgcgcgacctcggcctgcagccccgccaggtcgccgtctggttccagaaccgccgcgcccgctggaagaccaagcagctggagcgcgactacgccgcgctgcgccgctcctacgacgcgcttcggctcgaccacgacgcgctccgccgcgacaaggacgccctcctcgccgagatcagggagctcaaggcgaagctgggggacgacgaggacgcagcggcgagcttcacgtcggtcaaggcggagccggcggcctcggacgggccggcccccgcgggggtggggtcgtccgagatcagtgactccagcgcggtgctgaacgacgcggacccgcccgtggcggaggcgccggcgccggcgcccgaggtgcagggcacccttcttgtcgcgccggctggccccgttgccggcgcagcggcggcgaaccatggcggggtgttcttccacgggagtttcctgaaggtggaggaggacgagacgggccttttagacgacgacgggccgtgcggcgggttcttcgccgtggagcagccgccggcgatggcgtggtggaacgagcccgcggaacactggaactgaaccgaggtggacgcggcagtgcagcgtagtagaatcgggatctcggacgagcggtggaggaataaccgaatagaggaattcggagcgataaagaaggggcttttctgcaaattttgtaaaacggggttttacctagccctactttttgtcaattctcgagcgtattagcagtagacagtagtagtagtctgggtcggaacccagtcaagctcagcgcctgggttgcgtttggactccagtgcagaattgcgtagaggatttagaggaagagcggagctgagctgagcgaggcaggagtaaaggacaacctgtatgtcactgttagtgggcccagtgccacgtgaaagtcaggcactgttggtgcccattgacggccggacttgccagcgacgcggatgggcgacgtgaacgtgtctggccgagcagtgcgctcgctccctccccccaatgggccatggcctcttccgcgaaagcgtgctcccctgtaagtatctgatttggatgctagccaaggctgctggatgattacttcgattatctaaaaaatctgatttggatgctcgccgctagatcgttggctcgctgcggagggaatcggcagcggtgccgtcagattgtggaatgtgttcaacggttatctgttggattaatgtgggcttggcccaaattaatattcaataatagtcaatgctaatggcccacttt

SEQ ID NO: 79 - DNA, 1416 bp, Zea mays
ccacgcgtccgagcagttgcagttgcagcggcctcctcctctgcttcctccctcctcctcctcaccatggtgctggctgcgcacgatccccctccccttgtgttcgacgctgcccgcctgagcggcctctccgacatcccgcagcagttcatctggccggcggacgagagccccaccccggactccgccgaggagctggccgtgccgctcatcgacctctccggggacgccgccgaggtggtccggcaggtccggcgcgcctgcgacctgcacggcttcttccaggtggtggggcacggcatcgacgcggcgctgacggcggaggcccaccgctgcatggacgccttcttcacgctgccgctcccggacaagcagcgcgcgcagcgccgccagggggacagctgcggctacgccagcagcttcacgggccggttcgcgtccaagctgccctggaaggagacgctgtcgttccgctacaccgacgacgacgacggcgacaagtccaaggacgtcgtggcgtcctacttcgtggacaagctgggcgaggggtaccggcaccacggggaggtgtacgggcgctactgctctgagatgagccgtctgtcgctggagctcatggaggtgctaggcgagagcctgggcgtgggccggcgccacttccggcgcttcttccaggggaacgactccatcatgcgcctcaactactacccgccgtgccagcggccctacgacacgctgggcacggggccgcattgcgaccccacgtcgctcaccatcctgcaccaggacgacgtgggcggactccaggtgttcgacgccgccacgctcgcgtggcgctccatcaggccccgcccgggcgccttcgtcgtcaacatcggcgacaccttcatggcgctctccaacgggcgctacaggagctgcctccaccgcgccgtcgtcaacagccgggtggcacgccgctcgctcgccttcttcctgtgcccggagatggacaaggtggtcaggccgcccaaggagctggtggacgacgccaacccgagggcgtacccggacttcacgtggaggacgctgctggacttcaccatgaggcactacaggtcggacatgaggacgctcgaggccttctccaactggctcagcaccagtagcaatggcggacagcacctgctggagaagaagtaggcatggtatttgggtatggaagatggtggatgtaagcaaacaaagccaaattaagcagagtaggttaattaaggttggctgatgatccatttagggaaggagctgatctccctgactccctcctccaattttctcaaccaaatttatatagtataataataataataaaatagcaagtaatagttgtatcgtattattattaattaatttattagctggtaggcaagtagtatt

SEQ ID NO: 80 - DNA, 1020 bp, Zea mays
gggtgctcctgctccctccgatcctccctcccccgcttccctcgccatgtgttcgacgcattgctccggccggcctgtttttctctgcttcatctgcagaaacgcctcgctgtcgcaggtggagctagccaagcggctcgttgaagtgtcgttcgcggaccgcgccttcttcgccagcactggcacggaggccaacgaggcggccatcaaattctcccgcaagttccagcgggccgcgcacccggagagctgcagtgtggtttcgggcgcacaggccacctctgggcgcacgaggcgtacggagtggaaccagacataatgaccttagcgaagccactggccaacggcattcccatcggcgttgtcctggtgaaggagaaggtcgccgcagccataaactacggcgaccacggcacgacgttcggcggcgggcctctcgcctgccagaccgcgataacggtgttcgacaagatcacgagacccggtttcctggccgaggtgtccaggaaaggggagagcttcaagcagctgctccgcgccatgctgagcgggaacccgcacgtgagggaggtccccggggtcggccttctcgtcggcgtcgagctggacgtgccggctggtcctctggtcgacgcgtgcttggacgccggcgtcatcgtgctgactgccggtaagggcaatgtggtgaggctggtgccgccgctcatcgtctcggagaaggagctggagcatgccgcggatgtcataagggactgtctaccggcgctcgatgtcgttgctgctgcctaatgtatatggtggtgccataggtcgggatatgaaacctgattccaaattttggaatcgaataatttcatgtcgggccaatgttgttgtgttcattgaagcaaactcttttttttttgaatcgaataattattacatgtcagaccgatgctagctgttccgagagcaaagtggttttattatgcaaaatggtctgaagagtgttacggggcgtttggatcccttcattttaga

SEQ ID NO: 81 - DNA, 1529 bp, Zea mays
ttcggcacgagctttggttgctgtggtttcgtgatggcggcggcggcgatctgcgtggaggacgaggcggcgtgcgccgccgcggaatgcgcggggatcgggaatctggatctcgctgccgccggcgccggggctggcggcaagaggagcgtctatctcatggactgcgcgccggtctggggctgcgcgtccacgcgcggccgcagcaccgagatggaggacgcctgcgccgcggccccgcgcttcgcggacgtgccggtgcgcctgctcgccagccgccgggacctcgaccgtctgggcctcgacgctgacacgctccgcctgccggcgcacctgttcggcgtcttcgacggccacggcggcgccgaggtggccagctactgccgggagaggctccaggtgctcctgaggcaggaactgaggctgctcagcaaggatttgggggagacaagcgaggccgacatgaaggagcactgggacgagctgttcaccaggtgtttccagaggctggatgacgaagtgtcggggcaggcgagcaggctcgtcggtggcgtccaggagacacggccggtggccgccgagaacgtcggctccactgcggttgtcgccgtcgtgtgctcctcccatgtggtggtcgccaactgcggggattcgcgtgttgttctctgccgtggaaaggagcccttagagctgtcgattgatcatcaccctgacaggaaggatgaacgagcgaggattgaggccctggggggaaaggtcatccaatggaatggctaccgggtctccggtatacttgctatgtcaagatcgattggggaccggtatctgaagccgttcgtgattccaaaaccagaggtcacggtcgttcccagggcgaaagatgacgactgtctcatcctcgcaagcgatgggctgtgggatgtggtgacgaacgaagaggcatgcaaagctgcgcgccggcaaatccaagtgtggcacaagaacaacggtgccgctggcgcatcgtggtcgttgtgcgacgagggtgatggatccaccaccgaccccgatgcccaagccgcagcggattatctcgtgagggtcgcgctgaagaagggtaccgaggacaacgtccccgtcatcgtggttgacctgaaacctcgaaagaaaagctcaggagcaactcgtagcatcgggcgttctgggtccatcacagtagagctgagctgaccatggcatggccaaagaactgctgctaggtgctagctggtcgtccgcacgagacttgaccggcccacagttttttttttgggtccgttgggcgtcaagaattgtacatgtatatatggtagatgcgttttccgtggagggttatggcgctcaaccccgctcttgtttctgttggctaaaaatctctccaatcggcatctctaccgtgagccccccctggcacttagtatgcccctaatgctgtatgatagtcgagctagtaaagagccaagcggctgagacgatcactaaaattaacgcgctgtaaccttcatgattct

SEQ ID NO: 82 - DNA, 813 bp, Zea mays
tcctccatgatgggtggcagcggggtgaagaagtgcggcgcccgaaggtgctgctccaagccgccgctgtacatgtttgacacgtcggagccagacaggctggcgacgctactctggaagctagggggcatggcgaggcgcgacggtgccgctgcagccgtcttgctgcccccgttcgaagcaacgccccgtgccacgcccttctttcttcgtgttgacgaagcgcccgccggtgcctcttacccgacgcatcgcgtggaggtggcgcgactcgtggagatagggctgcggcatgaacagcacagcgaccactggtcacaggtcaaaatggtgacagtaaagtttgcgatcgagcacatcgcaaatgggtgccatgaaagtagggaaaagttaagccgccggtcacccagaggtacaagaagagagtctcctcacctttctgcctttggcgagcctgttctcgctctccgccttggcgcgagcacggcgacggcggaggatgccttcgtactgcttcggattcacatagatgggtgcatcagctgtcgcatttagtggcaacagcattctcccaccagactacgttacatgtggggaagaaaaaacaaaaggccattagagttctggcgtttattagaaatttcagcgatgctgtcagtatcatgcttcataacctgtacttgctcttttattcaatgaagctatataataatagtataaggtaaagttcgagcatatatattaatcaggtgatctttgtgtttacatgcatgattgtagcaagaatacatgtgatctgagtattttggtgcg

SEQ ID NO: 83 - DNA, 1468 bp, Zea mays
atcgaggcaaagaagtctattccggagtgacagtagagaaactcaaatactttctcttattcaccaatgtctacagccttacctttatttatatttaatatatatagccagcaggggcaacccctctttccttgttcctaaaaacactagtagtgccataatacttgggtttctttttttctttttctttcaaagcatttaatcatgtatatggagcggaagaattgcaacgaccacagccttgattgataccaccttgaatggacaaacattgcagaacgtgttcttctaacgtcatggagaaaaacagagggcgcgtatgtaatgtatccatccatccgtatccgattcgctaggttctgaagagctcgaggcagtgctcctggtccaggttcctgctccagaacttggcgtagtacttgtcgtacgtgtagttcctgtacacggccggggtgtcctcggtgacgagcttccgcgcggggccgagcacgacgtggttgcacgggcacaggaacgacgccacggacatgcgctcccggtccgagttcaccaccgcgcggtgccacacgctccggtactgcccgttgctcagcgcctgcagctggtcgccgatgttgatgatgagcgcgccgggctgcgggttgacggcgacccactggccggcgtggagcacctgcaggccggcgacgtccgggtccatgagcaggatggtgagcgcgttggggtcggtgtgcgccgggaggccgtaggtgagctccggctccgggcacggcgggtagaagttgaccgccatgtgctgctcctgctcccccagcgcttccttcatgtagctcgcctctaggcccaggctctccgagatcgcggcgtacagcctgaacccgagctcccggacctccttgcagtaggtgcccatggtctccttgaaatcgggcgggttggacggccaatcgggcaggaactcgtcgaggggatggcagtgcaggcggaggtagtcgcgccagttgtgcaccgtctccttgcgcacgttgaagctggtggacagccggatcttcctggcggggtcgtcggagtagagcttggccttctcctcggggggcagccggaagaagccgcgccccgcggccatcaccgccgcgaccagggcggcgtgtatcccgtggttgacgacctggaagaagccgtgcgagcggcaggcgtcgccgacggcggccacgaccgcgccgcggtcggggctgcccaggtccacgacggggatgcgcgcgccggtcacgacctccgcgaggcgcgggcgctccggctccggccgcacgtagctccccggcagcgtgtcgtgcacggccgtcgacaggaggtgctccgccatgccgccggcgccgtgcgtgcctacggaggtcggtcggtcctgcgctgcgcttgcgtgcagcagtccggcgcggcagcttggtgtcgtgcgcggttccgcctccag

SEQ ID NO: 84 - DNA, 852 bp, Zea mays
aaataaaagctaatgtaataatttcgagtacaaaagtcagtagagaataagatgaaataatacctaatgtacatattatcagagatttcctggccgttgcacaactacaatacatgtccaacagttatatcaagaaactatatgctcgtcagacttatgtgtgctacagtgctaatagaacaaagggaagaaaaacaccccactgtcacagaaatttcaatcgcctgctgggccatctcgcgttttcatcatcaacaacaacaaagcttacagtcccaagctagttggaataggctagatatcttttgcagattgatccaaagtaatacatcatttgattggagcaacaaatttgtaagtactgctgtgttctcatgcaaaaaaactcagtgctggttgcctccttgttgcaaactgaccaatccaaagtatgttccagagggacccttagccataagggatgcatgtgtgcccttctccacaacaattcctttttcaagcacagtgatctggtcacagttctggattgtgctgagcctgtgtgccaccacaatgcttgtcctgccaaccatcactcggtccaatgcctcttgtaccaccttctctgactggctgtccagtgcacttgtagcttcatccagtagcaggattgcagggttcttcaggatggcacgggcaattgcaatgcgttgtttttggcctcctgagagctgcaccccctctcaccacaccatgtgtcatatccatccttgaggttgctaatgaagtcatgtgcattcgcagaccttgcagcattctcaatttctgcttcggttgctgtttctgtaccatacacaatattttctcttattg

SEQ ID NO: 85 - DNA, 1240 bp, Zea mays
  misc_feature (1022)..(1022): n is a, c, g, or t
aaattaagttcaaatgatcactgcaacatagtacatatttgtgatggtgaattgataatatagtggagcattagataggactagaactatctcatcctatatattccattacatctcaaccacattctagcccaaataataattatgtgtctgcacatatacacacttgtattcataaataataggtgcacgcatgcaagcatgcacatatatgcttcgagccacttgaaagtcacttgaagcttgtgcaaaccttgggagattctaggagtggattccaatcccaaatcttttccaagttaggaaaaggaagcaatggagcttgtgttggcaaggtctggttagggtctccttggcatccaattgccctactcagctcatctattggaattgttgccattgtagcggagtttgcattaagcagggcgtgtgtggaagaaggcagcattggtgggttaacacccttcatgtggtagagtgatgtaccgtcctcctctgtcgacgtggtggagctaagtgagggggttgataggaacattgacgtctgtggtgccaatgtagctgctcaagctgcggctgatgatgccatgcccagcatggtggtgtttgctccactgtatggcttgttcatgtaacctgatgagtggtcaccgtcgaacactggcgccatgcggggcgacgccgatgtccggtggtgcttcttttccatggttgctgcagccttttggtagcggtcggcctcgcctgaaggaaggcggtactcgttcatgatccagctgctcctgagtcccttgggtgccttccccacgtagaacaccagcgtcttcttgagcccgatcggccgcttgacctcgacgtagaccgtgcgggcggcgcccgtggccttccagtagccggacggcgtgacccggtttggggcggtcgccgttgcggtacttgcggtctctcggcacgtagaagtaccactccttgtccccgatcgaagccagagcagggagatcccatgggtcgtagcggtagangtcgacgaggttgatgagctcgatgttgaagcgcttgccctccacctacggcggaggtagaagtcgatgagctcctcctccgtggggtggaaccggaaccccggcatcaccatgtcgcctccgccgccttgctgcaggtgcccatcgtcgccgccgccgtgctgctgcgggtggtcgcctccggatgctccccccatcgatcgacggcggcctgccgc

SEQ ID NO: 86 - DNA, 837 bp, Zea mays
gaattccattgtgttggggtccaactcaaaaggttttagaacctaattttctagttggtgccccgtcgtttgctaggtaacctgaagctggtagtcagttaaattgtgttgttttaccagatggtcaggctaagagtagtactattggaaagggatttgtaaagattttggactcaatctccgctcccccagcttttgctggagaattcccagctatccaccgcaaatctttggctcatatttctggggggcgccccaacacactccatgtttctgctgaagtgatccgcgtaggaagtttagctgttccttctggcgcagataagtgggcgctgcaaaaggatcaaggcatggagctggtcttttctgcagattttgagcctgatacccgtcttcactgtggctgcaacaccattaccgcggtgctgcgtggtggcttctgccttttctttgtttcggcaataatgctcttagtgagctacgaggtgggcatgtgcatctatggcaagtagcagcctggtattggattaagataaatctcatgacattagattaatccagtgttctgaggcagactcaactggggcctcctgctagcttttaaatgtattgcgttgcatggcgtggacctgtggggtgttcagcactagcagtaccattttgcttgcagctcgagagctaatggtgtatgtatgaattcggtgttatttagtaatagtatgcgaattgcctcattggtgtgtgatgatgccatttgccatggaaatcctgtatatatataattcagatctgccatggaaatcatgatgcttttgcagtatagttgtgttggtgttt

SEQ ID NO: 87 - DNA, 729 bp, Zea mays
gagggagtgagtgagagagagggagccatgacggagctgtcgacacggccatgaccagcctcctccacctgccggaggtgctggaccgcctcgccgccgcagacggcgaccggcggtcggccggccaccacgcggcgcacgggcacggccacggacgcgtccacgggctcggcggcggcggcggagcgccggtggacatcgtggagagcccccgcgagtacgctttcgtgctcgacgtgcccggcctctccaagtccgacatccaggtgacgctggaggaggaccgggtgctggtgatgaagggcggcagcgggaagcggaagcgcgatgaggaggaggacatgaacggcgaagggtgccgatacatccggttggagcgcggcgcggcgccgcggtcgttcgtgcgcaagttccggctgccggaggatgcggatacgggcggcgttgcggcgcgctgcgagaacggtgtgctcaccgtcaccgtcaagaagctgccgccgccggagaagaaggccaagatcgtgcaggtcaccatcgcctagaagtcggcagtcggcagttcggcactcggcagagtagcagcagtagaattgtaaagcgtacgtagtggcctgtcgtgttgggtggagtgctcttttgtttacgtttgtgctgctgatgagccggtgggtgtgtgtaacagaccgtgcttcttttttgaacaagaattattcaatcgtgtctctggtg

SEQ ID NO: 88 - DNA, 2013 bp, Zea mays
  misc_feature (1756)..(1756): n is a, c, g, or t
gaagattggtcttgttgggcgacgagggcgcgctggccgcgacggaggaggaggcgcggcgttgcggggtagggggcggatgcgtcgaattggtcgggctggacttcaaggcgtgcggtgaggctgctgccgacgcggcggtggatcgggcctggcgctgcttcgccggactggatgccttcgtcaactgctactcctacgagggggaggtgcaagattgcctcagtataagtgaagacgagtacatgaagaccatcaaagtaaatgtgataacaccttggtttctaatgaaggcgatcgcaaagcggttccaggatacaaaatctggtggatctattgtgttcttgactcagattattggtgctgagagaggattgtatccaggcgctgcagcatatggcacaagcttgggagccatccaccagttggtccgtctgtgtgcgatggagcttgggaaacacaagataagggttaacgccgcctgccgcggcctgcatctgcaagacaagttccccgtgtccgtgggcaaggagaaggcggagaaggcaacggcggaggtgatgcccctgcggagatggctggatccggagaaggacctggcgtcgacggtgctgtaccttgtcggcgacgagtcccggtacatgacgggcacaacaatattcgtggacggtgctcagtccatcgtgcggccgcgcttgcgatccttcatgtagcctagcctagggttaaatgcatcggctgtccctgaacttcaaaaatgtgtttctagtccttaaattgatatttatatataaaaaatagtgtatggtaggtctatttctggaccatatcgatcactgttctcacgtggaagaagccctgcccgtacttatagctatgaaattctaactatctgttactagtatatatataacctttaatttgttgatgatggaatcaaaagaatggatcttttactaccaaggaggcgagaggccggctgagaaagaatggatatcagtggatgcagatgcccggtagcttccactggaactttcccgcgcgtcgctcctcgggtgtgccggcggtgtagttcctccagacgtcgaggaccccgcggaggtcgtggagcttggcgccgaggccgacgcagcagttggcgtggagcgtgcagatcctgttgaggtccttgctgagctggcagaagccgctgatgtaggctgtgtcgaggaactggatggcgaggtccagcctgggcgcctcctcgtgcttgatgaggttgaacacgtcctgctcgtgcttccccaggaagcgccaccgcccctgctgccacgcccggtagaaggcgacggtcttgtccgacgcccgcacgaagaggaagccgccgttggggaagttgcgcaggctgtaggggtcgcccatgtacacgtcgctggagatggcgatgtccgccgccatggagatgtggcggaacgggtcgcggaaccacatcacgtcaacgtccgtgaataggaagttgtatcccagctccagcaccgtctgctggaagcggttgcgtccccacatcatctccaggtagtccttgctcatgaacaccttctctgatcggtagtcgacgccgttgcccgtgcgcaggaagtagcagtggctgtgcacggccctgcagccctcgtaggcggccgggtccatggtgacgatgaccaggtggtccaggaggcgcgccacgccgccttcccccgtgcggaagctctcgaagaagaggtccagcagcgagccngggcgcgtccacgccgcgttgatctgcgtcatgatcaccgtgcggtccttggtcgccgcgcgcgccagcacctcctccaggtcgccccacggagacggcggggcctggacgggcgcgggagccggcgccgtcgcctcggcaaggtccgccgctgccggcgagtcggaggaggtggaggagtcgaggaggaggtcggcggtggagttggagttggaggtgaaggcggagatgtcgacgaggcgccgagcgggcgcggc

SEQ ID NO: 89 - DNA, 749 bp, Zea mays
actcttgcccatgtgcatgactaggctggacaagaagagagcttatgtcttcttcaagacctctattgatggttacacatcttgtgctaaggatatgaccaagccttcagtgattgtcatagccttctatttattatttcttctgaattcgagtttcaagacaaagaacatatttaagaatttgaccagaagtcaagcatcaaccatgtcgagattagcgtgcatgatatggttagttcttgtttgctaagcataactctgaccagtggcatcgtcaaggagtgcgtcgcgaccagtggtgctggcagcaaggccatgacactcagggtccatgggtcgtgggtgtggcttgttcagcgcctactattcgcgggagtcggcgaggtgcctgctgaacttggtggaagtggagtacagttatgatgctgacatcgacctcgtgttcatcgacctgcccgtgctagagcaggagcggtaccggtggacactggagattgtggtgtaggccatgacgcgtgggcgtcgacgtcagcgcttgtcttcgcgtctgagccactctgagttggagaccattgccatttgtgatgtgcatgagagatgtattatggcgtcttgttgtataattggtatggagagagtatgttttgctatgtccgtatttgcatactctacatgctctgaatgttgtataacactggacaataaatgatgatgtcccttcaataggaatctcatctctaaacaattag

SEQ ID NO: 90 - DNA, 676 bp, Zea mays
cataaatgaggttgcaattctttcacagatcaaccataggaatattgtcaaactccttggttgttgtcttgaggcagaagttccactattggtgtatgagtttatatcaaatggcactctttcgcaccatctccatgttgaaggaacaatttcactctcatgggatgaccgactaaggattgccctcgaaatttccaaagctttggcttatctacattcatcagctacaaaaccaatacttcacagagacatcaagtcatctaatatacttcttgatgataatttaactgcaaaggtatcagactttggtgcttcaaagtacatcccaattgatcggactggagtgactactgatgtgcaaggaacctttggctacttagatccaatgtattattatacatcccgactaactgacaagagcgatgtttttagttttggtgttcttcttatagagctgcttaccagaaagaaaccatatgcctacagatctgatgacggtgatggtctcgtttcagaattttcatcattgctagatcaagggaccttggttgacattatagatcctcagatcatggaggaggataaacaagtcgatgaagttgccaaactagcagcaaagtgtacaaaattgagtggagaagatcggcccgacatgagggaagttgagatggcactt

SEQ ID NO: 91 - DNA, 817 bp, Zea mays
tcattaaagcagttagggcgcagcaactctgatatagactcttcatcatccaagtctaagcagtcttggcaagacttatctgacagcagcctcaggggacaacacacaccaacgcaatctgctacccactatttttccagggttgggctttttatagggctgatccatattatgggggggggggggcaggatacgcttcaaatggaattggccatccccaaattaggggggcagcaaacactagggtaccattgccagttgggcctgcagcagaggaacccatatttgtcaatgcaaagcaatacaatgctatcctccggaggaggcaaaaacgcgcaaaactggaggcccaaaataaactggtgaaaggtcggaagccagcatattcctgtcatgcaaattaagttggatacaccatatctccatgaatctcggcatcgtcatgccaatgaagcgagtccgtggaccagggggcgtttcctcaacaaaaaggagctccaggagcagcagctgaaggcactgccttcacttcagactccaacaggtggggtcagcaaaatggcctttggcaggaacctatgccctgaaagcagcacatctcactcgccttcgacgagctctacaatctcgagtgcttcaaactggagtggcacgctagctcatcaagagcacgttagcttcgcatctgctaataaattcctccccagcatgaacttccacgcggagaatggaggtgaaaagatggccatcaatggcgtccgccaccacacccctgtcctgaggtgaacaacctcaactgtgggggtgctgtgctggt

SEQ ID NO: 92 - DNA, 771 bp, Zea mays
ttcccgtccagaacagcgcgtccgatttaatatatttgcctctgatacattctttgctcttccttccaagatccatcactgcaaatagcgatgaaggcaatgaagtatggatctgtgccagtacagttaaacttttccagcgatgaatcaagggagtcaaaggggcatgattgctgcaatacagtaatgtcccagtacatcatctcaacctatggagatttgtctctttctcaagcacttgatgactttgtaagtttgcaatctcaagggagaatatctattctgtcacggactgctcattgtgcacaatcaatatctcttaacagattaaataatgttctgaacaacaatataggtcaaagttgcaatcggaaggctcaggaagatgattgagtgaaactatcttattttctgaagttacttgcttcttgaatttaacataatttacttcccaatgtacagaaaaatgaccctttgcattgggatcgacagatcaaggatgggatggctaggggttcttcatgggacgcaaagtgctatagccttcattgggaggcttattcatccataacgaagctgtgaactgggcatccgctagagaagcacatgacctacatgaggcaccatctccccaaattaagggtaccattttttggcatataattagactatcatttaatttcttagatgaacatttaatcaagcaaaaggtcagtgaataaaaaatggtatgtagagctgcactggatttcataaatattctagtttact

SEQ ID NO: 93 - DNA, 826 bp, Zea mays
gcacgagccacgacgaggtggacttcgagctgctgggcaaccggcggggccacgagtggcgcgtccagaccaacatctacggcaacggcagcacctcccgcgggcgcgaggagcggtacctcctccccttcgaccccacccttcggtcgcacgcctacgccgtggcctggacccccacggccatcctcttctacgtggatgggacgcccatccgcgaggtggtccgcgtgccggccatgggcggcgacttcccgtccaagcccatgtccgtgtacgccaccatctgggacggctccgcctgggccaccgagggcgggcggtacaaggtcgactacgccttcgcgccctttgccgccgacttctcgtcgctcgtcctgaccggctgccccgtcgccggcgggggcgacgacctcgcggccgccgagtgccaggtggccacgatgacggcggactgcgccgtcatgacccccgccaagcgcgccgccatgcgccgcttccgccgccggtacctcctctacacggtgtgccacgacatgtaccgctacaacggcaccgtcttccccgagtgcgacgccgacggctcggaacgcgacgacttccacaagtggggcgagtccaagcgcgtgtctcccagcagccgcgggtacaagcagcagcagcagcgcgcggacaaggccgtcgccgttgccgcgcctggccggcccgacacgtggccgaccgtagggacattacgtgtcgactaataatgatatgttacggttattaggagattgatggatttatattagtggacaaatacaaacaagcatagctggctgaaccgctg

SEQ ID NO: 94 - DNA, 612 bp, Zea mays
caccaatttattcagctcaaaacttcaacagtatttcaaagcgtctgtcctgctaatctgcgatgactgatgaacatgcaattgataacagcctcaggaccagcgaggcgctgcgaatggactgtccatgactgggatgtcctttttcaaggcacttgctccagcaggagcaggcattgtgttctcatgggcgcagaaacgccagcatgcgtttttcttcccaggtgaccagatggtattcttcctcctgaacgccgtcgagctggtcgggcttctcctcacgttcaagcccttcctggcagtaccagagcagtacgatacgagatagttagacgatctatctatctatacaagttctggaacgttcaagacgattcaccgggtgcggctgtaccagtgaaaggagaagcgccaaagcgtgtgccctttacgccgcggaaggtctacaaacagggacatactcctatataggaagatgcaatgcaagagctggggtgtacttttaaattgtaggtgatgtagtagtgtatggtagtatcagcattttctgcattcaggaaatgcacacgcaggtggtgggaaatgtgggcatggatcgagagtcgctgcgct

SEQ ID NO: 95 - DNA, 653 bp, Zea mays
ctgcattttttcttcttctctaagatcaacaataatactatcattgttgatgcgaaatgcacccatctgctactagtagaaaacaatagcgatttgcagatgcatcagactgctgctatcagtcgacgcctctagcacagtctagtgctcactcgatcacaacctggtacggaaagaacacacggggtagctgctccatgcccaatcctaaatcaggcacaggcaataccgatacgccaatactagtactgatttaagaatagcaagcatactagtatgtccgttccctctattttcttcgaaaaggcccgtatgcttcacaactcggcccacaagagcggctcgtgcatcccgacgacggcgtcgcagccgtcgtaatgctcagcggccattgccgccggccaccacagcccgtcccgcaggtcgaggaggaggtcgggcaggtcgaacagcgtgctctcctcctcccgtccctgtcctccgtcgccatacgccgccgccgtctcggggcagcaggcggcagcttccggcgagggcgacggagcccgcgcgtcgcactgcacgtccacgtccacgtccacggccgccgccgccgccgcggctaggaccgccgcggcctggatgtccgcgggggaggcggacgccggccgggg

SEQ ID NO: 96 - DNA, 1616 bp, Zea mays; identical to SEQ ID NO: 71

SEQ ID NO: 97 - DNA, 713 bp, Zea mays
gacttaacattagtagtggattagttctggatatagattttagagtagacgcacgtgatccgatctccgccggcctccattttacaaaacccctccttgtccgggccgcacacgacggagccggagaagaaggaaacagcagaggccgcgcgccgtgcgctcctgcccttccatcatatcgcctagctagcttctgaccaatctcctccgatggctattagctaattaactaatgaactcactacctcccaagaaccgtaattaaaatcaactaagtggtgtgaagaagtccagcgacgcaacccggtggagagctagcgcgcggacgtgcaccgagctagaacggccgggttacgtggtgggtggctagccgtccgtcggtcggccggagtggcacataatgcatggtggaaccggccggccgctggccatgtcatgaatcggtggatcgagtggtacgatcaggcgtcggtccaggcggcgaacacgggcatgtgcgcgatggagacggcggccctggccgacgccgtcgcggacgcccaggagcccagcggcatgagcgggctcatgggcttggcggcctgcggcggcttggagaagagcatggacaggccgccgccgcggtcggggctgccctcgcgggagatgccgaggctggtgaccagcgacgacctcgcgctggacatgggcacgtggtgcgcggcgctgtgggc

SEQ ID NO: 98 - DNA, 536 bp, Zea mays
gaatcttaacaaatgttctgtgacatgaaattatgtccaatcctgactacacaagtctcatgtgtgaatttgtctttgaggaacaaaacttctttaccccttctgtgtaattgccacgtgtcctagactctagtatcctaaatccctttctttcccccctttcacgtgttaagggagacacccctgcggcacggcaagcatctgccactgccaacatggaggcctccaaacaaataaagaaatctgttcaacctatcctagatacaacaacaacaacaacaacaacaatccgtgtgccaaaggaacagtttatggacaccacaccacgccatgtcctgccgtccttgtccttcagtcagtgtacagcaacgacgtcgggaaaaacatgtcctcccggggctcctccttggccctcgacgcgtgcatggcgtcgttctgcctctgctgctgctggtgctggctcatgtacgagcccatcgggttggtgtgggaaagggaggccttcaaggctgtgacgtgtgtccggcgtgtacgtc

SEQ ID NO: 99 - DNA, 639 bp, Zea mays
aggacactgttccttagtagtaatatgtacaaatactacgccaagtccattagtccaataacggataatctaatctacacaatctgcaagtcacactgctaatcaaatctaagcagcagaaccctactggccactcagtactaacactccatacatccagatccagcaaacaacacagatctatctcatatcccaagggggctccacatccgtgacatgccattttcctggttccagttgcaatttggagccagctccagcactgaactagtgttgttcgagacactggtcatcgctgtcgtgacagattccttctcggaggcgtcgaactccagaaggtccccaaggctcactggtcttctgaatggcagtgccggcagaccggagaagcagtacacctgctctgcaaccgttggggcggcgtaagtgtcagcgaggggcgcaagcggcagggcagccggcagttgcggttcagctgatggggtgccgtcccgggcgtcttcagattctggccttgggctggttgttctgctcttgtagaacaccctgcatagcacccagtcctccttgtttggcgcagctgctgctagcaggcacggcgcggcatgggggtggaggcggaactcgtgcatgacccac

SEQ ID NO: 100 - DNA, 561 bp, Zea mays
acagccatgatggtagcaagttgaatgtaattcctgttttggcttctcgctcacaggctttaaggtatttgtatatccgatggggggtagccgtgattgtcggtgagtgtggtgacacagattatgaaggactacttggaggcgtgcacaaaactatcatactcaaaggctcgttcaatactgctccaaaccaagttcatgctaacagaagctattcatcccaagatgttgtatcctttgacaaacaaggaattgcttcaattgagggatatggtccagacaatctaaagtcagctctacggcaatttggtatattgaaagactaaatctttgatctttgctggtcagcagaggaatcaaagcaggtatcgtgagacagttttgctacaaatttttttctaatgttgagagatatttcacacccaagatcggcattcgaagtgcaaagttgaaattacatgtgtgcttttgaaacttaaagggcaaatacacaaaccgacacttatctacatggttttccacccatcacagtgcatcttgcttatctacttaaacgcactc

SEQ ID NO: 101 - DNA, 3648 bp, Zea mays
gtgcctacattacgactgacctaaattactgacgatataattcaaaggaagaaccgttttctattgagacttcggaacttcaatacaccatactgtttttttaattgacatcaaataacttcaaacctgaaagtgtcaaatggctcgaaatcgacacacacacacactccatcgatcacgggcagaaacggctccatccagtttgtccttcaaaatcaaaatggtctcggatcacaaaccgggaaagccccccgacctacttcccctccgctgcccacctatttcacctctagtctctaggctctggagacctcgcgcaccatcccaccagcagcaagcgcccactaattccgcaccacaacgcgcactctccggcaccaccgccgtcctcgcgacgtcacatagtacgcattacgcactcgcgcgcgcgcgtgcgcgtacatttacgcagcgatgagctcgagaacgcaccacccctgctttgcgtctgtggagtcatgggagcaagcggcgatggcgcacgacggcttcctcggcgatcttgcctgcccgctcccgctcgctcacgctgcaaccgcggcgccgttcgacccgctgcgggtacatgtggcgcacgcgctcacgggcgccggcgcggggtgggaacacgacgccgcgacgggcgcgctcgtgccgtcgcggccgcgaccgctgtcgccgtcctcgctcgcggcggccaccgccgtagtagttggaggaggaggagacgccgtggaggccgcgctgatggagcagcttgcgagcaggctcggcgtcagcgtgccttcgccgccgccatcgcggtacgcgtcctgccacggcacgccggcgggctccccctccaagtcggcggcgccgtgggtgctggccggggacgcggcgcctgcggagcgcgccacagggctcccgtgcttcccggcctcctgtggggagctctcgcgcgtgcccagctgccagtcgtcgcttctcggcgagcacgcaccgactccggcgcccgcgccgttgcctggcgctgctaaacagcacgcgagcgacgggtcgtgcagcgatggcccctgccggaagcggaaggcgtcgggcggcaaggccaaggacgtggtcaccacggccacacccaaggtactaaccatctctgtttcgccatttttgaaactctgtcaaacaagcctctgatgaatgggtgtcggaattcggaaactgtcaagtcccgggagccggagacgatggccaagagacgcaagctctcgacagacgccgcccgcgacgaggctgggtcgcacgggaacggcaaggggaaggaggtggcgccggcggcagagccagagccacagccacccaaggactacatccacgtgcgagcgcggaggggccaggccaccgacagccacagcctcgccgagcgggtacgtgtacgccgccggcgaacacctttccttcgatcgaacagtttcttcagtaaaaaaaaaaaaagaaaacattagttgctgatggtcgccgtcaccggctctcttcaggtgaggagggaaaagatcagcgaacgcatgaagctgctgcaggacctcgtgccaggctgcagcaaggtaagtaaacatcgacggccgttgctcaaaattcggttgaaaacacacgcatatttcaatttccaaagactcctcgacctcgtgaaggttaccgggaaggccgtgatgctggacgagatcataaactacgtacagtcgctgcagtgccaggtggaggtgcgtgcgtatgatctgcactctgctctgtctgctcttcttaggacgtagagcatagctttttcctttttaattaacggaaaagaaaacacgagctcttctgaactcgagcaaaacgggtttgcttgcttccgggacagttcctgtcgatgaagctgtcgacggtcgacccgcgccgggagctcgacgtgggctgcttcgtcgtccccaaagacgacgtaacgatgcaggccaacaggctgtgcgcgcccgcgacgtcgtcgtcgagctcagccttctgctacgccgcgcggagtgttgttacgaacgccaaaggattcgagacgccgctgcccttggcgaaccatggcgtcgcggcggacgacaggccacttgagcggcggactcgagacgcaggtccccaggtacgtcaagacctgctgcgtccatctatttcctgtcgctgtgcgatccactccaaactgtagatcgccatggatttcaggcggggagcttgtgggaagaggacgatctgcagagcctggtcctgatgggattccggggccgttgatcgttgacgctctgattaggctaggccgctagggacgacagttcgtttccaccgaccgccaaccaaagcgagagttgcagggccacgtaacagcagggttgggctccaatcattgggaactctccatgattgtacacagacaggacgcttacacgctaatttccagctcggcggaggccaagaaacgaaacaaaaaaaaaaggcgaaaagaagatgtttttttctcgcattccccctcacgaatttgcagtttaatcgatgtaagataactcaatgtaattattaatggtatttgagtcttatagacatcaagttgatgaaattttatactacacaagatgctttcggtaacagctgatctggatgccttagtttcatgtcggcacctactaccttcctttacattgtttgttgtttgcctgatgcagtctacgtgtgagctggacgtgtcaaccactctctatgtatgtagaatcctaaccccttttagcgtctcgctatcatgcatgatcactttgtttatctcatccggacaacgaggcagggggttagacgcagctgttttttttttatattctgtcctgtcctgtcccttcggttgcgttgcattgcatgatgagcggaactgccatatagttcgtaacctttcatcgcggccggccggccggcaatgatgagttcccgcgcccgacgtgtgtataaaactccctctcggcattccgagtaatgatgtgaaggacactcggttatatgtatggaaaatgttagtccccctatctggttcgagggattaaatgttagtccctacattttagtctctaaactaccaaacgatgagactaagacatagattaaactgcgacagatgactaaaaaagattaaatcatattaattcatcttttatctctaacatatttcagttgtaccaaacagagtggagactaatcatttagtccccgaccaatctgaaatcaaacagagtagagaccactttagttctcccactaaactttagttccttgactaaagaaacaaaataagaccttagtttattcagtaatgcaaaaaaaaagtagcgttgatactctgatagtaatcttgacatggaactgtggttcgttggtcactggacgcgtaacatggaacatgatagaatagctgcaagaaaacgaaggcaggggttgggtcatagtggagaagattccatccagcgtagaagcatctgtgtgtgacaggcagcgtcctcttcttccctagtcgcatcggtgtacgaacctgtgatgaacgcttggcacactgcccttcatggccaatgtccccggagaaaaacatccaaaagtact

SEQ ID NO: 102 - DNA, 474 bp, Zea mays
attgtgttggggtgttttgcagctgcacaaggagccgacgctcgggttcaaggagctggagtggttcgccgacatcgacctcttccacgagcaggcgcccaaagccagcaggacgttggcggaggtgccggagcttttcggataccaggcggcgaacgacgcggcgtactacaggccggccaaagccgccggcggcggcggcgctggggttcgccagagcaagaaggcccggatcgaggtcaccgacgacgaggactaccttatagtccctgatcttggttaaataagagagcgcaggagttttgtttcttctcctgatgtgtaccagagaagaattttactgtgtacaagctagtgtcatgtgttgtgcatctttgactgtagtgtcgctcaattctgaacatctattaagccacttttgttgctatgctaataccagtctgagagacactgatgtttttaacagaacatttg

SEQ ID NO: 103 - DNA, 494 bp, Zea mays
attcggcacgagccacactcccaatgcaaagcagatcgttgagaaggaatgcctcggcaagccatcctgcatgctgccggtggatcacacagtgtacggcgcggacatcaactgccaatcaacgactgccacgctaggggtgcaggtgagatgcggaggcggcaagaagggtgcctgagaacaacaagacggatgctgctaattgacgtttcagctcgtttgtttgttcgtcccttcggtttggcactgatgctaatgacccattggtctgccattgcaattgaaatgtgattggaacgtgcttgatcgggaactaacatgaaatgagtgaaggatagatgctgatctgaaaaatatgtgtgttcccccctctttccttccatgtcgtgttgtttcaggtaaccgtcacaatatatataggtggccccctttggaatccggggattattccgtttgctgtatttttttctgtgaaaatgaactgattcctgtct

SEQ ID NO: 104 - DNA, 805 bp, Zea mays
taaggctccaaacataaaccgctaaagacggccccgaattggcattacccatctgaaattatattctgaacaacgaagaatttgcagccaagaaacgaaagaatgccgtcacttgtcacagatcaagtggcgatgaacatcagtactacaatggaacttcaatcatgcctgctgctacttctgcactacaccactagaacaagatattagcagaactttttttgttgttgttgttggttccatgaagaaaatctgaactatacacagtttgcgttgcgctgcatccggtcgtccccggagtcgccgaaggatctcagaagaaggggaagccgccgtccggctccatcttggcggccatcggcgagacgagcatggagccgtagaaatcggcggcgtcccccggcatctgcaggtcgtcgaggttgatgcccgcgagccagtcgtcgccgccgaggtcgccgaagtcctccacctcctccttgggcaggacgacgccggcagtggctgctgctgctggggctgggcccatgtcgtcgaacgccggcagggagcccagctccgggaacgtgtcgtcgtcgatctccgactccggcgtccgcgtgtcggagtgggagtgcgagagcgacgcctccgactccatcgccttcttctccttctccttctccttctgctgctgcatcttctcccactcgttcttcttgttgtacaggcggcacagcacccagtcatccagcctgagcgtgccggcgccggacttcttggcgcgggcgccgccggcttcggcgaggcggtactcgtgcatgat

SEQ ID NO: 105 - DNA, 689 bp, Zea mays
gattaaaatcttcgtacacatattcatatccaatggagaagaatttcttccagatctgtacatggagattaaaatcttcgaaaattatcgggtatcggatctctgttgacacatctaggcctgagcccgccgctgtccccgtggtcgctgcaagcatgccaatacaagtatacaacacagggtagggaagagacagacaaagggaagcgacagtcgaggtagtacttataaacaagagcaaaatttcgtcggttgttctgtcgaagagagtttaagtgaacagctacacatatatctacccgtctgctttggaagtgaaactaaagaatgagccggcccggccgcgccgccggctccatgtacgctacaccgacactcggaaaaccttgtaaccccaacaagggtcagggtcaggttcgactcctatgctgtatttacagagttcgcaacattgcagccgtcttcatctcctgatccatggctccatcctcgcctcagctaagaactgtcccaacccggcgtccatcctcgcctcagctcagaactgtcccaacccggcggctccggcgggctggttccccttgaccctgggagacgcgaagagcgaggagtagaagtcctccccgggcggcggcagcatgtcgaggccgctgtacatgccctggatgtcgtcgtagctgagctcgtgc

SEQ ID NO: 106 - DNA, 889 bp, Zea mays
attgtgttgggctggtatagacgggagctgagcttctagcaacgtacagtgtatccgccatgagtcctttcggggcggtgatcacgccagaaaccctcaagtacatgtccaagtaccagggacgtgagatcacgcaggtggactgcgcacgggaggcgatgaggctgatccacgcggaagacaagaacctcaaggccgaggactcagcgtgggagctgaagaagaagttcggcaacggcgtgagcaccatggtcctcgtctacaacgccaccggggccagcctgagcctggtggacgacgggaaagactggatgggctccgtctacagctcgccgatcccggacaccttccacaacgggcagtggatcgccttcctccacgtcaagcccggctcgctggcgcagggcagccaggccgccagggtgttccgcggcagggacgtcgatggccggactcgggacttcgtcgtcgcctggtacatcccgtgggacaacataccgacacgagcttacactgaaattggcagtgaaaactacttcaagactcggtggagtagtgtcaaaacgagtctaggacattcaaggagagtgacccgtgccaaggacgagaactgtgcgtcaactgtcagcatcggtggctacactacagccttctgcatcgcagtcctacaacaccagttccagccgctgccggaagagcgcgaataatcaatcaatcgatcgatcgagtttgcgatcgtgttacctcctaaataaaagttgtacacgcgaagtactactccagtatttacatgtatgtttctagcaggtgtacgtacgctactcctgaataaattgtggtgcacgcaataaataaataattaatgctcctggataaatttctgcctccc

SEQ ID NO: 107 - DNA, 491 bp, Zea mays
ggaagtgcatcacgctgcacagcagggtgaacgtgtccaacccctacgaccaccgcctccccatgtgcaaggtgacctacacgctccggtgcgccggcaagtaggtggcgtccggcaccatgccggaccccggctggatcgccgccagcggctccaccgcgctggagatccccgccaaggtgccctacgacttcctcgtctccctcgtcagggacgtcggccgggactgggacatcgactacgagctccaggtcgggctcaccgtcgacctccccatcgtcggcaacttcaccatcccgctctccacctctggcgagttcaagctccccaccctcaaggacttgttctgatctagtagtagctcgcttgccttgtgttctgtgcgggcgcgcaccagcgatctgtacgacgagcttttgcaaataaacgacgcagctcctctgttctattatctcaatgaatgcctaagctaaggggatggatggtttaat

SEQ ID NO: 108 - DNA, 2367 bp, Zea mays
taaatctcattttttttccaccgtcaattcaagaaaaagtggagtaaacctgacctgagtgcatccttttatgtttttttagatagaaatcaagaagaaaaaaaatcagacaaactgcacctgtcagtaggtgaaacatgtggatgacatcaccgacagtaacgttgactaagatacacaggcttattccgactaaattccgctttcatgctacaacgtctaaagatactttggatcaagacaacaagccaatcgtctcttaatctcctttttttcaaaaaaaaacagcagcagatgtcgcattcctatgtttgaacctaggcagtagaacacgacacgttcaactcaaccgcgcacgacgcgatacagtccagaagccatgtgtgaggaatggctttgcagccagccgtggtcgccagttcctgggcctcggctaatctcttgttgatggtctcgagggcgtctaggttgttgtggggcggcggcgcctccatgctgtagaggatcaaggacgtgctagagagctcggccttctccagaacggagccccctgctgcggcgatcaaatcttcgaggttggccctgtatcccggcatgaaatggccactgaagtagaaggtcaacccagcaaacagacctggtgcctgctgcatcgctcggagccttcctgagcgagggccgtcgacagagccatgaacatcacaccttatctcgtagggctcttctgggactggttccctagcctccatacaggctttcagccaattcacattgagaacccacttcccagctaaaatagccatgaggaccttgagtgtccgtgcacatgccccacgttcatccgtattagcaatcacatgagtcacatctgaactccaggtgttggttactgtgatgccagtgtgacactcaaactgatccaagatttccttctcatggccaacgagcgcagatccacatatcacccattcactagtcagaaaaggtgaggcagtccaaagttcagccctttgcatcggagagggtgaaatcggaccatcaatgtcggaagatggttgctgcagcttggccttcttttttggctttaatctctcacaaggcaacttttttgacgaatgtgtaggacacagcataacaaagttctcttgatcccatttgcagcctttgatgttgtaggcacatgggacatgaaaactttgcgggcagctcttcacaaggcagccaagtgctgcgccttttaagccacaaacactgcatttgatcttagaagcacgggccaactcaggccccaagttgtttgcggtgtcaccagtaaagaatgcttgaggagcccattcaatgcatttctcatggacatgctgaacacttgatttccaagcttgatcagcttctactggctccccattcaaataatgtgacaaagggccagtacactcagtaacttgggaagaatgacagaactcacatttccaagcactggccatgtttgtttgtctttgaactggatcatttgatttttgcttcttcaattctctggtatgatcatccattgcatttgcctctcgtttcaatgcagtttgaagaggtgataggcttgtcatcagttctccttcgaggtcattgctgtcacagtccaaatctccagggccatcagaagattgtgacccagaatgaccctttcgtacaaaagccattggtgcaacagctgcggcaccagcattgttctcaaatgcaggatcttttgcttgaacactatcaatgttcccaaatgcaggtccagttggttggttatatactagctttgaagcaacagggttgtaagatttcatctggtcagatttctcctccaccccacttctgtttcctgattctggtgttccatgagatgctgcctttgcaacatgaatgttaatttgagaatcctgttgttcaatcatggtgctgacggtagagctgaggctcctatgaatgctcactatcgactcaaggtgagaagctggccttaaatcttgagaacaatagcctgatttgcaaatggcacagctgtagccttttgaagtcggtgtaagggcacacttgctgcaggatgtgtggtaacacggcagcgttgtgggcgaggtgagcaacttcaggcagacggggcaggtgagctccagctccatcttctgcaggttgagcaccagcgggttcaggaacctcctcaggttctccatcttctccgcaagacacgaacggcccttcctagtttctactactcccgccttcgcctccccctctcctccctccgataccgccctcgaaaaggtctacggccgtgaggggacagagagagagacggatcgcgaggcagatgcggtgccgatggac

SEQ ID NO: 109 - DNA, 1583 bp, Zea mays
aattaacaaggccggtcttaattatttccttatcagcagaaacagtagcacatagtagtgcaaggtacatagatgctcccggcccctagctagagcagacgagatcaataaggaaatacattgagaaaattacagagcagtaataccagataataaataacagaatgaacggtggaatgacaagtactcgagagtcgagacgatgatgttgttctggaaccgctccaggccttcttgccggaaacgtcaccgggagccgccgccggtgcagtgcggccatagaaaaaaatccagtcatctttacttccagtcttggatcgccgacatggtcgcctctccacgctctacctccacacacacacaacacacaggtacactacacagacgctatgtacatctagacacctcatgcatggtctggtcgcataccatgtctcctttgatccttttgtgttttactggccatcccttctacctccccactggcatgccatcatctgaaaccccacaacaaatcaacctttccctgcctcccctccctccaacagccatccgggaatattcacacatggaggaaaatatgtacaaggatcatcttagtacaaatctagaaaaatatttttttttttttgtttttcccacgaactactttcctctcctgctgctgtgcagtgacgcctctaataagcttccctcacgcacttaccatggataagcaccgttcagaggaggcacggctgatgctggtagtttcaggagtttccctcagttgatgaggtcggagacccagccgacgtccggagccgctccctctacgttggcggaggcggcggtgtcgttgggcacggcggtttctttgctgagccgttcgaacaccttctcgcggagggctctcccggactcaacccgctccatgaccggctcctcatccacgaggagcccgaggttgaggcgttccacggtcatgatggtggcgccggaggcggtggtcaccatcaccgggcacggccgggttggtggtgtggacgggagactgtacagaccggccggtgacttcggggacccgaacgggtagccgcctgccaagaacgacccgccggaaggcgccgacctcggcgagccgccgctgccgccaccgccgaggcggagctggcgcagcgaggcgaggacctcgttgacgggcgagccgccgacacccggccacgagccgcggcggagcgccgcggcggcggcgtccggcgacattggcggggactccgacggcggcgacctcgggggcgagaccagcgtgctggtcggggacgacgacatgacgccgctcttggtgaggtagccgtagctctcgaacgcctggcggcggagcggcgagccgtcgtacgacggctcggccagcggcgacgccgcggacgcgcccctcgggctggactgctgcgcctgcggcacgcggagctggtcgggcgtgtgcgcgaagaagcagacgcggcggcggcacccggtgccgtccttgcagggctgcgtccggtagcgcgacgggtggagccagcactcgaacaccccgtgcgccagctcgcacgcgtcgccgc

SEQ ID NO: 110 - DNA, 2440 bp, Zea mays
gtccagtccagagtccaggctccaggactaccaccacttcgtctcgtcctcacacctcactccaccacctctgccttgcaaagccttccaccgatccgccgcctcgtccgcgcgctcgcaggcagcagtgtggactacccgccccatactccatcccctactcgaaggatacaccgacctcgagttaagttgggcgaggagaggtggttcattccagcagggatccttctcgtgagcccagtcgatctgaccgtccttggtatctgggggggttgttctgtactctctctttaatttgtgagtcgtgacaggttcttgaagtgcaattgttaagagttttagttgtagaggaagagaaggatttgctaatatggcgttggcagggacctccaaagtagtgctgggatgtatcgcctttgggattttctgggtgatggccgtcttccccaccgtcccgttcatgcctgttgggcggacggctgggtccctccttggtgctatgctaatggtcctgttccgcgtcatctccccggaggacgcgtacgccgcgattgacctcccgatcatcggcctgctcttcgggacaatggtcgtcagcatcttccttgagagggctgacatgtttaagtacctcgggaacctgctctcgtggaagagcagaggcagcaaggacctgctcttccgagtctgcatcgtgtccgcgtttgccagcgcgcttttcaccaatgacacatgctgtgttgtcctcaccgagttcatcctcaaaggttgctaggcaaaacaaccttgccaccacagccctttccttctggcccttgccactagttcgaacatcggctctgctgccacgccgatcggcaaccctcagaaccttgtcatagctgtcgagagtgggatctcatttggccagttcttgctgggagttttcccagctatgatcgttggggttctcacaaacgctgctatcctccttttgtacttctggaaatacttgtcggtggagaaggatcaggagggtgggcagcccacaggaccagaggtggttgccgacgatgaggttacttcccatcggttcacaccggctagaatgtcacatgtttcttctctgaatccagatgacatggattgcgtaagcgaaccgatcatcaggagcaacagtgtcagtactactgggaatgagaacctgagaagcagaagcatcaattctgaggctgacattcagcttgcgatcaagtctctgcgggcatcaagcatgtcgcatgagatggtagaggtctcgacggttcctgatcggagagatgaaggtgcatcctcaaggaagttcacaaggactgctagccagcaaaggagcgtgataatagaggatttagcaccctccccagagattaatggggaaaaggagaaagaaactgaagttgcagagaagagatggaaagtacttgtgtggaagactgctgtttatcttatcactctcggtatgctcattgcacttctaatgggactgaacatgtcctggactgcaatcactgcagctcttgttcttctggcactcgattttacggacgcacaagcttgtcttgagaaggtgtcatattcactgctgatctttttctgcgggatgtttatcactgttgatggcttcaacaaaacgggcataccgaacacactatgggagttagtggaaccatattcacgaatcgatagtgcgaaaggtgttgcacttcttgccgtggtgattcttatcctttcaaacgtggcctctaatgttcctacagtcctattgctcggtacaagagtggctgcatcagcggcttcgatttctcatggttcagagaggaaagcctggctcatccttgcatgggtcagcaccgtggctgggaacctcaccctcctaggctctgcggcgaatctgattgtctgcgagcaggccaggcgggcccagttcttcggctacaacctcaccttctggagccacctccgattcggggtcccgtcgaccatcatcgtcacggcgattggtttgctcatcgtcatcagttactgaaacagctgaaggcagaagagcgtagtgtaagagaagcagaatggataaaaatccttccaataagaagtacatgtaaattaggcttgccctataactcaagtgtgtatcggtacgttatgtctccgtctgtgctcttgctcgtgagcaagcagcacatggctgaccgtgtagcttgcatttccattgcataataggcttatgaagaatgctttggtaatatgattttacagtctgacaaggattgtgaagcagaggcagtgtaccatcaagataatacttctggaagcatataaaaaaatttcgtatatttggatttcaaatccagtctgcttcagactggaaattcatattatcttctggaatcgtgctttattgtcagaaacatgggctaaaatt

SEQ ID NO: 111 - DNA, 508 bp, Zea mays
  misc_feature (4)..(4): n is a, c, g, or t
  misc_feature (15)..(15): n is a, c, g, or t
  misc_feature (238)..(238): n is a, c, g, or t
  misc_feature (260)..(260): n is a, c, g, or t
  misc_feature (263)..(263): n is a, c, g, or t
  misc_feature (344)..(344): n is a, c, g, or t
  misc_feature (379)..(379): n is a, c, g, or t
  misc_feature (405)..(405): n is a, c, g, or t
  misc_feature (451)..(451): n is a, c, g, or t
  misc_feature (463)..(463): n is a, c, g, or t
  misc_feature (474)..(474): n is a, c, g, or t
  misc_feature (486)..(486): n is a, c, g, or t
  misc_feature (498)..(498): n is a, c, g, or t
ctgnagtcgacattntggatccaaagatttgcgcacgaggccacatcgagaacacgatcgagcacacaagcacgaagactcgtttaggagaaaccacaaaccaccaagccgtgcaagcatcatggagtacggtcagcaggggcagcgcggccacggcgccacgggccatgtcgaccagtacggcaacccagtcggcggcgtcgagcacggcaccggcggcatgaggcacggcacgggnaaccaccggcggcatgggccanctnggttaagcacggcggcgctggcatgggtggcgggcattccagcctgcgagggaggagcacaagaccggcggcatccttgcntcgctccggcagttccagttccagttcgttcggangacgacggcttgggcggaaaggaggnaagaagggattcaaggagaagtttcaaagagaacttgcccggaggnccaacaaggacngaccagcaagnccacggggaaanaaccggcggggntttttggggc

SEQ ID NO: 112 - DNA, 1036 bp, Zea mays
ggacaaccaatttgtcgtgaatttgagctaaaaaaatgtaatttacatttgatctctctctgctctaccgctacagcagcaggcacaagacgcagactgcttaggggtcacaaacaaggcttacagttacagccccacgaacaaataggaagcagtctgcgcctggtacgcctaacaaatactccatccgtttctttttagttgtagctggatagttcaattttgcactatccagcgacaactaaaacgaaacggagagagtaagtgttacacccttgtccagctacgggatttgttcttctactaacccgtttacaacagcgcgacagagacgacgaatttggtcaatatgatgatgaaagaaaggcgtgtcatttgagcgatggatcaatgtcggtgtgagaagggatgcggttcctgcttactccaggacgtctgttggccacagctgcctccacttggagatgtcatcgttgccgcggagcttccttatgccgccgtagaacccgtcgccctcgttgccctcctccctatgctccttccgtttcaccaacgcttgcctccaccttgagcccggcgtgtactgattaaactccagcaccacggtatcactaagatggcaccgacaaaagtgttcgcttccatcacatgactccaagtgcccaacaactccataccaccagccgtatgggaattctttgttccttctccactgaatctcgatgtggtcgccgggccggagctcatgcaggcagtcagaggtgtgcaggtcatgcgcaagggtgtcaacaggcggtgccctcaccctgtcccattgcacgccatcctccaacaccacggttcgtcgaccgtgtggtgggtaccttgcacggaatgtgtcggtatgcaaatcgtaactgagcgctgcatcgtagcatgacatcatgaacccaacatgcccatgctcgcgggggtaaacatgagccgggaaccagaacttgccgctctccacggacaggtcctttacggaaggaatgtcccggaccccttttttgca

SEQ ID NO: 113 - DNA, 1661 bp, Zea mays
gatagatcgcactacccggcgctcgcgcggctttctttcccaactccgacgaaggctagctacaccacctggtgcgggctcgtctccatcgcccgccacccgctccgtcgtcgtcgtccccgccgcgccgatcccgaatcgaatggggagcctggcgtccgagaggaaggtggtcgggtgggccgccagggacgccaccggacacctctccccctactcctacaccctcaggaacacaggccctgaagatgtggtggtgaaggtgctctactgcgggatctgccacacggacatccaccaggccaagaaccacctcggggcttcaaagtatcctatggtccctgggcacgaggtggtcggcgaggtggtggaggtcgggcccgaggtggccaagtacggcgtcggcgacgtggtaggcgtcggggtgatcgttgggtgctgccgcgagtgcagcccctgcaaggccaacgttgagcagtactgcaacaagaagatctggtcatacaacgacgtctacactgatggacggcccacgcagggtggattcgcctccaccatggtcgtcgaccagaagtttgtggtgaagatcccggcgggtctggctccggagcaagcggcgccgctgctgtgcgctggcgtgacggtgtacagcccgctgaagcactttgggctgacgaccccgggcctccgtggcggcatcctgggcctcggcggcgtgggccacatgggcgtgaaggtagccaaggccatgggccaccacgtgacggtgatcagctcgtcgtccaagaagcgcgcggaggcaatggaccacctcggcgcggacgcgtacctagtgagctcggacgccgcggccatggcggccggccgccgactcgctggactacatcatcgacacggtgcccgtgcaccacccgctggagccgtacctggcgctgctgaagctggacggcaagctcgtgctgctgggcgtcatcggcgagcccctgagcttcgtgtcgcccatggtgatgctggggcggaaggccatcacggggagcttcatcggcagcatcgacgagaccgctgaggtgcttcagttctgcgtcgacaagggactcacctcccagatcgaggtggtcaagatggggtacgtgaacgaggcgctggagcggctggagcgcaacgacgtccgctaccgcttcgtcgtcgacgtcgccggtagcaacgtcgaggcggaggcggcggcggcggatgcggccagcaactgatggcaccgcgtcgtcgagtcgaaccacgtctgtgcgccgcgtgcaacgttcgttcgggtcgagtctgcgtgcaacgttctgcttcctttactagttgttgtctttccgccttcttgccgttctgttctgggctttgagatgagacgatggatggtcagtttttaatgtcagactgaataactacgtatagtactgtagtattactcggagtacgccagaatgtggtgtggtgtcagtctcaccagcaatctggatttgccaagtgtttctattttttcttcggtttgcccgagtgtttgtgattgttaagaactacgttattacggatcgtcaaatccgttcccttctgtctcgtctatagtttagacgcgagaaaatattaaagacacgtctcccattccagaagcacgatag

SEQ ID NO: 114 - DNA, 1154 bp, Zea mays
atctcccactcccctccctcaccgcagctctcccacctccgccctccccccgcacgcgctcgccacctcgccctcccctccacgttgctcgcacccgcgcttatataagcgcaggaggagctcatggcggaagctccggcgagccctggcggcggcggcgggagccacgagagcgggagccccaggggaggcggaggcggtggcagcgtcagggagcaggacaggttcctgcccatcgccaacatcagtcgcatcatgaagaaggccatcccggctaacgggaagatcgccaaggacgctaaggagaccgttcaggagtgcgtctccgagttcatctccttcatcactagcgaagcgagtgacaagtgccagagggagaagcggaagaccatcaatggcgacgatctgctgtgggccatggccacgctggggtttgaagactacattgaacccctcaaggtgtacctgcagaagtacagagagatggagggtgatagcaagttaactgcaaaatctagcgatggctcgattaaaaaggatgctcttggtcatgtgggagcaagtagctcagctgcacaagggggagcatacaaccaaggaatgggttatatgcaacctcagtaccataacggggatatctcaaactaatggaggtatggaccttttctgcgacagctgctcttacctgaggcgattttttttgtcttagttatttactaagacaccttgcggtgaccattaaagagtaaccaatcgccctcaataggtccgtttttatctgccagaactgatgaggtcgctcactaggagtaagtcgcttccctgggaacggttgtcggctagcaccgctcttgtatgtatattaagagtaacttaatgattggtcttttggctgcgatttgattacatgtatttgtatcgggaggcataaatattgtgtaatttgtgttaaagactagtgtaattgaactatgggaagagctgctttggttgtaaccatattttgatgcccgtatattaggcaaaaatagaaggctgtgggcgtgcacaacatatttactgttcaccgaaatacttgtattgatgtatttccgcatcaattatagtcatcgtcagcttaactacggcaatgaataaataaaaattcactgagt

SEQ ID NO: 115 - DNA, 1659 bp, Zea mays
ccacgcgtccgttctcaaaggcgaaaagatcggtacacttttccacaacgaagcaaatttgtgggcatgttccaaggaagctacagcccgagagatggcagttgcggcaagagactgttcgaggcgtctacagaagttgtcatcagaggaacgcaaacagattttgctagatattgctgatgctctggaagcaaatgaggatgcaattaggtctgaaaatgatgccgatgttgaggcagcacaagttgctggttatgaaaagtcgttggttgctaggatgaccctaaagccaggaaagataacaaatcttgcaagatccattcgtaaaactgctgacatggaggaccctatttcccatacattgaaaagaacagaggttgctaaagatctggtttttgagaaagcatattgcccattgggtgttcttctcattatttttgagtctcgtcctgatgcattggtccagattgcatctctagcgatccgaagtggtaatggtctccttttgaaaggagggaaagaagttatgagatcaaatgcaatattacacaaggtcataactggagttattcccgatactgttggcaaaaagctcataggccttgtgactagcaaagaggaaattgctgatctactagcgcttgatgatgtaattgatcttgtcattccgagaggtagtaagtctctagtttcccaaatcaaagcaacaactaagattccagttttaggtcatgctgatggtatctgccatgtttacattgacaaatcagccgacatggatatggcaaaacggatagtattggatgctaagattgattatccagcagcatgtaatgcaatggaaacactacttgttcataaagatcttaacaagagtgagggacttgatgatctattagtggaacttgaaaaggaaggagtagttatttatggtggacctgttgcacatgacaagttgaaagtaccaaaggtagactcatttcgtcatgagtatagctcaatggcatgcacagtcgaatttgttgatgatgtgcagtcagctatcgatcacataaatcgttatggaagtgcacacacagactgcatcatcacaactgatagaagtgctgcagaggcctttctgcagcaagttgatagtgccgctgtgtttcataatgcaagcacaaggttttgtgatgggacgcgttttgggctaggtgctgaggttggcataagtacagagcgcatacatgcccgcggacctgttggagttgatggacttctaactactcgctgcattttgcgcggtagtggacaagtggtgaatggtgacaagggagtggtttacacccacaaggatcttcctttgcaatgaggcaaataacctccgttgtggtcgtaacgaatggctggactccccttttaagtacccttttcttttattccatgctacaaagtttggtgtcgtaacaagcagaatgcctatttagtaggcattgatgtaatcagaccattttgtcgtggtgttccttgtcgtataaaacatccgagacatctgtattagaggcgcggtagctagttgatacgcgattgttttggatgaaatttggatctgttccaatgcaatgataatgcatgtgtgatgaggtcctaaaaatctctgaatcgggattttggctc

SEQ ID NO: 116 - DNA, 1028 bp, Zea mays
gatcttcatcagccgcggcaaccccaccgtcgaggtggacataggcctcagcgatggcagctacgcgaggggggccgtacccagcggcgtatccactgttgaaaccaagagttgtctctcccaaggacgcatttcatcaccatcactaagcaacgcacgggtaccatcaccaggggttatacaatcatatcttgcagaactgacaatattttttttgccctcataccaagaatcagttccttatattgcttgacaaccgaccatggttgctagatcaggatacaaaaccttgctcatttatggtaattgatggttactaagttaagggttcccctctcaccaactctaggactaggaaaaagagggatgaaactcattcttggtgtttcgtataatgccttgaacaagtatcttcctccagaatgctttgacctcagcaaaacaccatttatttcatctaaggcatcgaagaaaaaactctttccgtccaacctccgacgacgatcatcctcctgtttgttctgatctcgtgcgggctccaccattgtaatgcttgccaccggtactggtattgctccgttctgcttgttcctgtggaacatgttctttgagaaacatgaccactacaagattttgcaaccaataagggtgctggaggttgttgctgtttcgttcatgtggaggggagaagagaggaaatagcggcgaccaagggcatgctccttgggatggtgcccccctctttgacagctctgctgttgtcgatgatgccttccttacaaagaggagatattacaggatatgcattccagattagatccttcaacacacatctttgtgttctgtttcaggatagttgtgcaagagaattacacaaagatgggacttcatattcaggttttgatttggaacttgactccttaagtgtaagcaccttagctgtcagtggatgccatgacagtggatgagggtgacagagctattgattccaactcatctgcatttggaagcatcagatgaacctgatc

SEQ ID NO: 117 - DNA, 1213 bp, Zea mays
ctgtaagcaatctccgaaagtctctggctgagagtcaattgatccacacatgctggggaattagagggtgcaagtgcaacaaatccgcttgttttattcaaatgttacccagaacgaccaacagcgaacacaagacaactacgcgaccagaaaggcaggaacacgacgccatagcgcggacagacaagacgcgacggatgcactgcacccgcgcggcgtctctccagtccggactccggagcacgcaagcgcaggcggcaggtgtgagacgccgtgccgcccaaccgtctggttgctttctttctcctcgcggttcgttcgctcgcccgcccgcccgctcctcgcctcaggcggtgatggagacgggctccgcctgcggcgcgtcggcggccgcggcggtctccttggcgaggagctccgacaccctcgcggcgaggctcagcttcgcggccggcgacacgccgcgctccccgatgatggactccagcacggcctcgcagaggcgcttgttctcgatcgccacgccgccggccgccggcaccgacgagtccttggagaaagcgacggtgaggactccggcgggcgagtgcgtgaagaggatggaggcgcccggcgcgaaagtctctggcttgaacacctccctgaacttctccacggcgacgccctcggcgtccgtgtacaggccggcggccttccagaacgccacgcagttctccgtcactttctccgcgtactgctcgcccgtcagcgggaggatcatcgtcaccctcgtgaacttctcgaagtcgcctgacgcgcacacacacgcacgggcacacaatgacacaacaccatcagcagtgttgactgttgaccatcactcacgcgcgagaacctctcactcacccgtgacgacgtcgcggaagaaggcggcgtcggaggcgagctcgtcggccgtcttgccgccccacttcttggccagcgcgggcacggccgcgtcctccaggtacacgccgatggccgtgaacttgatgaagttgcctccgatctcgaggcctcgcacgcctgcgccgccgaggaagtgcgagccggcggagcccggcgggcgggccaccggcgggaagacgacgccgtcgaccaccacctccggcacggccatgttaaattccgcaccgcgcgatggaaccgggagcagcgcaacggatgaagctacaggctacggttgtggcacttg

SEQ ID NO: 118 - DNA, 2758 bp, Zea mays
  misc_feature (2686)..(2686): n is a, c, g, or t
  misc_feature (2692)..(2705): n is a, c, g, or t
  misc_feature (2708)..(2709): n is a, c, g, or t
  misc_feature (2745)..(2751): n is a, c, g, or t
gcgaccgcgtcgaggacaccctccacgcgcaccgcaacgagctcgtcgccctcctgtccaagtacgtgaacaaggggaagggcatcctgcagccgcaccacatcctcgacgcgctcgacgaggtccagggctccgggggccgcgcgctagccgagggacccttcctcgacgtcctccgctccgcgcaggaggcgatcgtgctgccgccgttcgtggccatcgcggtgcgcccgcgcccgggagtttgggagtacgtccgcgtcaacgttcacgagctcagcgtcgagcagctcacagtctcggagtacctccgcttcaaggaggagcttgtcgacggccagcacaatgatccctacgttctcgagcttgacttcgagccgttcaatgtctcagtcccacgcccaaatcggtcatcatctattggaaacggtgtgcagttcctcaaccgacacttgtcctcaatcatgttccgcaacagggattgcttggagcccctgttggatttcctccgtggccaccggcacaaggggcatgttatgatgcttaatgatagaatacaaagcttggggaggcttcagtctgtgctgaccaaagctgaggagcacttgtcaaagctccctgctgacacaccatactcacaatttgcttataaatttcaagagtggggcctggagaaaggttggggtgatacagcaggacatgttttggaaatgatccatctccttctagacatcattcaagcgccagacccatctacactagagaaattcttggggaggatccccatgatttttaacgttgttgtggtatcccctcatggatactttggtcaagctaatgtattaggcttgccagacacaggaggacagatcgtctatatactggaccaagtccgtgcactagaaaatgagatggttctccgtttaaagaaacaagggcttgatgtttccccaaagattctcattgttactcggctgataccagatgcaaaaggaacatcatgcaatcagcggcttgagagaattagtggaacacagcatacttacatattacgagttcccttcagaaatgaaaatgggatacttaagaaatggatatcaagatttgatgtgtggccatatctggaaacatttgctgaggatgctgctggtgaaattgctgctgaattacaaggtactccagacttcataattggaaactacagtgatggaaatcttgtggcatcgttgctatcttacaagatgggaattacccagtgcaacattgctcatgctctggaaaagactaagtatccagattcagacatattttggaagaatttcgatgagaagtaccatttctcctgtcagttcactgctgatataattgctatgaacaatgctgattttatcatcaccagcacataccaagaaatcgctggaagcaaaaatactgttggacagtatgagagtcatactgcctttactctgcctggtctgtaccgagttgtccatgggatcgatgtcttcgatccaaagttcaatatagtctctcctggagctgacatgtccatatactttccacataccgagaaggccaagcgactcacctctcttcatggttcaatcgaaaatttgatttatgacccggagcaaaacgatgaacacattgggcatctggatgaccggtcaaagcccatcctcttctccatggcaagactcgacagggtgaagaacataacagggctggtcgaagcttttgctaagtgcgctaagctgagggagctggtaaaccttgtcgtcgttgccgggtacaatgatgtcaacaagtccaaggacagggaagagatcgcggagatagagaagatgcatgaactcatcaagacccacaacttgttcgggcagttccgctggatctctgcccagacaaacagggcccgtaacggcgagctctatcgctacatcgctgatacccatggtgctttcgtacagccggccttctatgaagcgttcggtctcaccgtcgttgaggccatgacctgtggacttcctactttcgcgacgctccatggagggccagctgagatcatagagcatggcgtctcgggcttccacattgacccgtaccaccccgagcaggctgctaatctgatggccgacttcttcgagcggtgcaagcaagacccagatcactgggtgaaaatatctggagcagggctgcagcgcatatacgagaagtacacatggaagatatactcagagaggttgatgacactggccggggtctacggtttctggaagtacgtgtcgaagctcgagaggctggagacgaggcgctaccttgagatgttctacatactgaagttccgcgagctggcgaagaccgtgccgcttgcaattgaccaaccgcagtagcttgcgcaactgcgactgcgtagcacttggtacaagactgaaacctgaaggaccttcagtaatttaggcgcggcagacggtagccaataaaatgtgccggagctgaactggtttttattatgtacataatggcagtataacaaaattactgaaggcaggtgggttgcagttgtgtgttcgttactgtttactgtaatatgtcaagctgtcggctgcaatttctttgctggcaagccgcaggcactggtgaagtgctgataaatacatcatattctgttgacctgtgaaaaaanaaaaannnnnnnnnnnnnnctnnagggggggcccgggccccccaatccccattaagagnnnnnnnaaacacc

SEQ ID NO: 119 - DNA, 1048 bp, Zea mays
tttacttggcaattactaatcaatactccatagcttaagcccatatcaacgccggcttgatcagacagacgaacagatctcagttcatttccgtctcgacggaaaaaaaatatttacaagactccccatctcttagtctacagaacaagaatacagccatacaggaccaaaacaaccacaagtaacattcctgatgaaggcaaaagggaaaaggaagctactaagtcgtcagccaaaaactccggcctgcctagttctctgccggcgggggccagttcagatccagttcgaagcccaccttgtttgccgtcaccgcgggaggcgaaggggagtgatcaaccacagacgacgagtcggagtcgctctgcgcaaccgcggccacagtcacggccggtggagcgaccttgagcatccggtatccggatgccgcggcagccgcctgctcgtagaaaaagtactgctgtggcgtcgggcaggcgacaggatagcccttgaacggaaaccgcatgccggtggagactgcgttcacggcggccgcccgatggaagaggtcgagatcgagagccggaggaagcggcatggcctgcataggcgcctggatgccacagccgctaccgccaccgctcgaatccacggtgctgttgctactggcgctaccggcagcaccggaggcgacggagcactgggaggggaacgggaagttcgtcttggccttggcgcctcggaactcgcgggcggcggaatcgtacgccttggcggcctcctcggccgtgtcgtacgtgccgagccacacacggcttttcttggcagggtcgcggatctcggcggcgtagcgtccccatggacgcttcctcacgcctctgtagtgcgggcccatgcccacgcctccgactcctccgccaacgcccagccccaggccggtggccggcggtagaggcgacttgtccgccacccggggcgccatggtctacaagtggcgtgtgtgtgcgggtcttccggttcagcgaggtggtgtgggcaagaggggggtgtatgtgcccaacacaat

SEQ ID NO: 120 - DNA, 1437 bp, Zea mays
ccacgcgtccggccaaaaggcactgaagaagccagtcaatagcgagttctactactagtagctagcctgctgatctgttctgttgtttagttcgcaaagccttctgtttcggcgaccatggaggatgagaggaacacccagcagcaccagggcggtgaggcccagcaggacgccgccgatcaggtggacgtgaaggatagggggctcctggacagccttctcggcaggaagaagcacgacgacgaccaggagaagaagaagcagacggatgagctggcgaccggcatggagaaggtcacggtgtccgagcccgagaagcacgggcacaaggaggaggagcacgaggtcgtcggcgagaagaaggagggccttctcgccaagctgcaccgcaccagttccagctccagctcgtcgagcgacgaggaagaggaggcgatcgatgagaacggcgagattatcaagaggaagaagaagaagatgggcctcaaggagaagctcaaggagaagctgccgggccacaaggacggccaccacacggccgcaccgtccccggcgcccgcgcccgtggagacgcatgcccaccaccaggaggaagcgcacaggccgcacgtcgtcccgaccccggccccgccgcctccaccgcacgtccaccagcacgaccacggcgtcgtcgtccaggacgacgtgaagaccgggaccccgccgcatgcaccggaggaggagaagaaaggcctgctggacaagatcaaggagaagctccccggtggccacaacaagaagcctgaagccgctgccgctgccgcaccggctccgcccgtccacgcgccggcgccggcgccgcaggcggagaacgtgagcagcccggatggcaaggagaagaagggcttgctgggcaagatcatggacaagatacccggctaccacaagagctcagctgaggaagcagaccacaaggcggacgccgccggcgagcacaggaccagctcctaaggtcgcagtcgcagcgcgtgtcctggccgtggccgggccttgggcgatcagaaggtagctagcgttggcatgtgggttcggttctggtttgcttttaccaaaagtttgtttcaaggtggatcgcctggtcaaggtccgtgtgctttttaaggtggatcgcgtgactggcagtgagtgttgctgcttgtgtaggacgtggtacgtacgggttttattttggttccaagtcaaaagtcacggtcggtctggatgttgtgtactgggtttgttgaattatgagcagctgcgcgttgtaattcggctgggctacctggatgcgttaataattgctttggtttctgcccagcgcgcgaacgtgttagcgtgtaatctctattttgcactatccagcgactaataaaaagaaacgggtatatatatatagtatatatatatatatcaatgatc

SEQ ID NO: 121 - DNA, 1490 bp, Zea mays
gcacgaggaacccgcccacaggacaggacacacagagccgagccaccccacccaccatcggcgaccagcagccagccgcgggagcgagctgtttaaagacaccgagtcggagtcggacggaggactggcaggcacaaccgaagccaccgcttctagttctcgggttcatcgccagcaatccagaccacataatgggacagccggtgacgaggaggagggagagggacgcggaggcggagctggacctgccgccggggttccggttccaccccacagacgacgagctggtggagcactacctgtgccgcaaggcggcggggcagcgcctccccgtgcccatcatcgccgaggtggacctgtacaggttcgacccgtgggacctgccggagcgcgcgctcttcggggcccgggagtggtacttcttcacgcccagggaccgcaagtaccccaacggctcccgccccaaccgcgccgccggcgacgggtactggaaggccaccggcgccgacaagcccgtcgcgccgcgcgccgccgccgccgacgcccgcacgctcgggatcaagaaggcgctcgtcttctacgccggcaaggcgccgcgcggggtcaagacagactggatcatgcacgagtacaggctcgctgacgccggccgccgcgccaagaaggggtcgctcaggttggatgactgggtgctgtgccggctgtacaacaagaagaacgagtgggagaagatgcggctggggaagggggcagccgccggcgcagtcaaagaggaggaggccatggacatgagcacctcccactcgcagatcacccactcgtggggcgagacgcgcacgccggagtcggagatcgtggacaacgacctgccgttcccggatccggcgatgatggtgcccaagaaggagcgggtggacgacggcggcagcgccaggaccagcgacctgttcgtggatctcagctacgacgacatccaaggcatgtacagcggcctcgacatgctgccgccggccggcgaggacttgtactcctcgctcttcgcgtcgcccagggtcagggggaaccagcccaccggacccgcggggttgggccccttctgagtgagctcaggcgaggatggaggcatggagatcaggagagaagacggacggcgttgccaactctgtaaatacagcataggacgaggagtcgaacctgactgaacctggtcggggttacaagtcgagtgtgtcggtgtttcgtacatgggaaccgggccttacatgggagccggcccggtcttggtttggcgctggctcattctttagtttcacttcctgcgcagacggtagatgtgtatgcatagctgttcactatcacttcctcttcaacagaaccgattcactccgaatggcaatgtttgaagtgaatccagcgaacggaaaaggttaggttctgtcgtgcgtgcaacgtggtggtagactggtagtcttccaatgcagcaggcatag

SEQ ID NO: 122 - DNA, 1159 bp, Zea mays
caccctcctctaggggtctctcattaaaccacttagtttcttatatttttaatgaaacacactgaaaaggcagacatatatatatatatatatatatatatatataggtccattcttattattacatgtaaaatgagcaaatacattttacccagagactagctaggcagtgaagacagaagcaagaataatctttactttttattacaactgaatcttaaccataatatagcttattatacgtggtctgtcgcatgaacattattttatttccctggcgtatcaaactgttacggatctccacgacgtcgcccattccgtaacgagaaatatcaatccgccaacgcaaagccattgtcggcgcatgcacagtgcgctagcaagatgcatgctgggtcccgtctcagtctcagtacccaccggcgaacttggacttgatgagatccacgacactggcgtccacccggagcgccttggagagcaccggcgtggggatcggcggagaggagccgaacagcgtgaggggcacgaagatgatgcccggtttctggctgttgaacgacaccaccatggtggcgtcctccttgccgacgttgaactggaagtgcacgaggccgcgcgggatgacgaacgtctccccggcgcggaccaccttggagtagtacctgttcccggagtcgaggctgccgacgatgcccacgaggagctcgccgcgggtgacgagcccgacctcggtggcgcgcgggtggacgtggggcgggttggtgccgccgggcgcgaagtcgacgcggttcatggacacgcccagcgtgttcacgccgggccactcggaaacgtccagctccgtcacgttggagccgttcgggttggccagggggtcgcctcccgtggcgatcttggtcgagaagaggaactggtcgccggccgacgacggcggctggcatgggtacccgttcactgacagcttgccgttgaggtcggcgacgcagaagtcctgcagggggtctgggtcggtggccatggcgaggagaggtgccagcaccagcatggtgagcaatgacgctagggctttggtgtacttctccattgctagctagctatttgctgtcgagagatcgatcctagttggtgtctggtgatgcccaacacaatggaattc

SEQ ID NO: 123 - DNA, 1517 bp, Zea mays
ggcggtttatcccccagcaccccaaccaacctttccacgtaccaccgggtttctgtccgcgccccgcccttcaaaagcaggtccgcacgccggccggcgagacgagacgacaccaccacgccgggacgggaggcacaggtgcggtctgcgtcgagagttggtccactggcaggccggaatgaagaagtgcgcgtcggagctggagctggaggcgttcatccgggagagcggcgaggacgcccgcgccgccgccggaggtagcagtccggggtgcggtggatcaagcgatcccggagggagcggcgtcttctcacccggcttcggtttcgccgactcggacaccatggatggaggcagttggtggtacgggaacgtccgcacgccgaacccagtcatgtcgcaggcggcgtccatatccgctagccccgggctaaccacctcagccaatcatgctcttgaaagcgagtcagactccgacagcgaatcactgtatgaggtagagggagttccatacgagcgaggtaacagatccattgagacgaagcgaataagaaggatggtgtccaatagggagtctgcgcggcggtctaggaggaggaaacaggcacagttgtctgaccttgagtcacaggttgaacgactcaaaggtgaaaacgcaacactgttccagcaactttcagatgccaaccaacagttcagtactgcagtcacagacaacagaatcctcaaatccgatgtagaagcgttaagaattaaggtaaagatggcagaggatatggtagcgagaagtgctgtatcgtgtggcctaggcgaccttggcctggcaccatacgtgaactcaaggaagatgtgccaagctttgaatgtgctcacagggttggatttactagggagtgatgcgttcaggggtccaaccgcaggtacacgagtacagaactcaccagtacagagcactgcaagcctagagagtctggataaccgaaagtccaacgaggtgaccagttgcgcggcggacatttggccttgagcttcaagccattgatctgattcaaagcttgctccaccctcaaaaaaaggaccagagtttgtcaactcaaatagctggtggcttgagcagagcttctggcacgagttctcttgaaccatatttccacataagctttataggatgcatcactcttttgatgtcacttagtttcaagtataaaatgaagctgtctttgtacaaagctgcaaatgagaagtaaatgaaacgtcctggacaaacttgtgaagtaggaatgatacataggctctatttccaggtcagatgagacagttatgtttacaacaaaaagcaatacatgttgtttagaaaccgctattaattcacaggaatgttcaatccagtacaagtcatttagtagatttgcacccctaccttctagtagattcaaccatgttttcactactacttgctgggactacaactgtacatcatgatggtaaaatgcataactagtgaggttcttgactcg

SEQ ID NO: 124 - DNA, 1137 bp, Zea mays
tgcagcaacgactgcgctgttacgcatggattcaggttccttccttcctcctcgcttcatgaagagatattacaaagacactaattaaggacacgtacgacgacgacctctgcatataatgcaggttacaaatttgacaatatacatatatattgggcttctgaaacctcaagtacagtagaagctgctgacgcgagtagtaggtacgtagtaattaatttgctgttaactaataatccggccggtagtagggcgtcatgcttctctcactaattaaattacactgcattacattacacgtacagagtgcaaaagaaagaaagagataaagaaaagaaaaactagttaacaacaaataatgttgggtcggaggagaagtgcgtgtggatgggttgttcccccttatccgtaactcagcttgatcacatcctctcttcgagatcgaggtcgaggccggccgcacacgtacggcatgcacagcacagctgcgcgcgcgacgagctggtggcggtatacatatacgtacgtacgttcttgactgcatgttgtggccagccggcacgtacggtcggttctgctagctagctagctaagctagctgctgacctcgtccaggtccgagctcgacgcatccgtgacgcagctgctgctagcggacggcggcggcgacgcttctcgctgcctcctcctcggcctgttgccgcccttctggaagacgcggcagacgacccactctccttgcgcctgagccaggctgcagccgttcttgtgcagcggcgcggcgaggcggtttttttttgatggaacgaagaaaatgacagtttacagcaaggacaaagaggtaaaaatacaattggaaaagacaaatactttggtcacatgaaaggccctttcgtgggtaaaaaacatcaaaaaggaaggcaggaatttgggatgaagaaaaacaaaagaataggaacatagaaaaaaatgggctttttttgcctgccagctggtcgcttagctgcaagcccctcctccgcactcaagacttgtgtgaatttcttaggcatatcttcacatctgaagtgttgctggattggacgcaaaagatgtgattggacaaagcagctaaatgttcccggtgtccgaaaatgt

SEQ ID NO: 125 - DNA, 1324 bp, Zea mays
ggcacaaggaaagatatgcaagcacatcacatgaatcagctgtggccgtgttacagttgaaaagctaaaagaaaaccagacaaagcattaccgagttaatccaaagttcgatcttaattatacaggcgttttgcagttccgctgaacggcccgatacagagcacaagcttagttttccacacatttacaacacaccagttacacaagggtggaacgtgaaagccaagaatgaattgcctgaaacagcgtacctaccccatgggcattgggcacttgatgatggattcctgcgcccagattgcacttgcatacctatctcgctacaaagctcgttcaggagaacgtgcgttaccgcagagatggctgcgcgtatgctgtggagagctatatgaatccggtctcgaatgcctacgcccgtggacaggaactgctgttcaaggatgccagagccataccgctacttcaagcctcgttctgtcgtagctgtagtaagtcgggagggacatggagatgctcggcgttttcgcctccattgggagcaccactgtcacttttctttgtgttcaggaagcgtcccccgtttcctcttgccctcctcatcgcgtgctgatgacgagactcgtgaaggtatggctttctggctttgaccacctttttctcaagttcagccttagcacgggactgccgtcgtcttaagataccatggtactgcttggcatttacataaacaggctcctcggatacttcaagaggtaatggcattcgagattgagttagtccaggtagctgaaaatgagccacagcatgacttccatagggagcaaccatgcctgcatagtaaggatctgggtactgatatgctgcagaagcaattgattggttcagttccagctgcgagtatggtgccaaatactctggcgccagagcgggtatctgcgatgtggcatggttcttttcttgactagcgcttccatcttttggttccccagatctccgtgaatcctcgctgctctcgtcactcgcggctcctttagccgcgccgccaccaccactaccacctgccgggctgctcgacaggctaatccccgtcccgctcccgggcgccaccgccacgacggctggcgagactgcaccgagcacagccccggagctcgtccaccacggctgcactgcctggccgccggacggcagcgcggcgccgtgccctatgggctccaccaggttcgttcggcccggccgcgactccatgctgctcatactagccgccttgctggcagcgccgctcaggccgtggccgtcgcactgggcgcgaaggagcggagcc

SEQ ID NO: 126 - DNA, 1838 bp, Zea mays
ggtagaaaatctttttcttgcgttatcttttattcattaattattataaagggctacatatttattggagaaaaagatagaaccccacactagcctatataacacctcgcagggtttttttttataacaaggacaagcatctgctcgagcaagagggcacaaaaacgatcgccatttctcacggcacggcatccaaacagctatctagcggcgtcggcgagcatccaaaattagatacagagacgcacgacaggtcgacgaaggagccagagccacgcttccgcggaagaggccattgggggagcgcacggccagacacgttcacgtcgccgatccgcatcactgacaagtccggcggtcaattgggcgccaacaatgcctgactttcacgtggccctgggcccactaacagtgacatacagcttgtcctttactccctacctcgctcagctcttcctctacactcctcttcccactgtccctctctcccctttctgcatcagtgtttggtctcatctctttttcttgcatttttttttgcattcgagtccaaacgcaaccaggtactgatctcgactgggttcctaaagactactgctactgctaaaatattcgcgcgagaattgacgaaagagggctacgtaaaactccattttacaaaatttgcagaaaagcccccgcctctcgctccgaattctttattcctccaccgctcggcccagatcccgagtctacgctgcgctgcatctacctccgcctcggttcagttccagtgttccgtgggctcggtccaccacgccatcggcggcggctgctccacggagaagaacccgccgcagggctcatcgtcgtccaggagccccgtctcgtcctcctccaccttcaggaaactcccgtggaagaacacgccgccatggttcgccgccacggcgccgggcgcgtcaagaagagtaccccgtacctccggcaccggcgcctccgccacgggcgggtccgcgtcgttcagcaccgcgctggagtcactctcggacgaccccacccctacggggggaggcccgtccgaggccgccggctccgccttgaccgacgtgaagctcgccgctgcctcctcgtccccgagcttcgccttgagctccttgatctcggcgaggagggcgtccttgtcgcggcgcagcgcgtcgtggtcgtgccgcagcgcgtcgtaggactggcggagcgcggagtagtcgcgctccagctgcttggtcttccagcgggcgcggcggttctggaaccagacggcgacctggcgcggctgcaggccgaggtcgcgcgccagccgcgccttgcgctccggctccagcttgttctccacctcgaagctccgctccagcgcgcgcacctgctcggagctcaggcgccgcttcttctccccgccgccgccgcacgccatcatctcctcgtccgcgtccgcgtctgcgtccgcctccatcccgaccacgccgtaaccatcatcgttcggattggtcatcgcagccagagggggactggcgccgcgtggccgcttcatgtcgtgttcgatcgagtgaaattcggaggccaccgcaggactaccttatagcgaggacaggatcaatgagctggggggagagcgccgacctgctcgtctctgttccctgccgtgacccatggccaacaccatgcaccttcgtcggacgatacagttctctactacaattgcaaaatttccagtggattcctcgcgatccaagaaagctctgggactgagagacaagacagtgtgtggagtgaggcctctgtgtctctccccctctctttcttttttggtttgctttcag

SEQ ID NO: 127 - DNA, 280 bp, Zea mays
ccagttccccaatctggaggagatccggggctccgtcgtgctcgcgctcaacgaggagtacgcggccgactcggccgcggtcgccgacggcgacgagctcgctgtcataccgcccatcagtggcggctgacgttattaaccacggccgacttgtgtggaggtaataaaagatatgaagacatcgatcgttgaggaaaaaaaaaagagagaagaaaggttcctctcccttcttcatggtcagtttatcaccacgaatgattgaaattattatatgctcgac

SEQ ID NO: 128 - DNA, 1255 bp, Zea mays
accgcgaacactatttcattcattcgattattattcaagaaagccccggatacatcaatctgaagaccgttgaagggtgtatttacagcttctagcctttagctcgtccttgtcccagtcccagcttcacggtcgacctccacacacacaggctcgacaagcacttcactcacgtcccgccaccatggccttgaccctcctcaccaactccttccggagcagctgcctgtcgaaggaggaggcggagaggaggcccctgttctcctcggcgcgcctgatgaggtaggggatgatctgctccaccggcccgtacggcaggtacttgctgacctggaacccggcgttgcggaggctcagcgacagcccgtccgccatgcccatcagctgcgcgaattgcaggttgcggtctcccttggggatccccagctcctgggcacgcgccgccgcgagttggcctgactccacgttgtgggtggcgagcatgacggaggcggacccgcggcgcacgcggtcgaggaggaaggcggcgcagccgttgtagcagtcgtgggtctcctggatgctgccgtgcacgggcgacggcacgccgagcgcggccgcgagccgggcctcgcgggtcaggtacgcgccgcgcacgaccttgagccccaggcgcacgcgctcccgctccgcgccgcgcaccatggcctccagccggtcccgcgcgtcgcggaggtacgcctggatggtgccgtgcacgatgggtcgcccgccgtccgccgcgccggcgtcgttgaacgccagcgcgcccaccagcgtgaagtagtcgatggccggctgcaccgtcgcgtactccgcgtccaccagcagcgggatgccgtgctccgcgcaccgcgcgcacaccgccagcagccgcgagtgcgccagctgcagctccctctcctcctccgccgtcagcgccgccggctccgacgcggtcaggtggagcgggctcgagtcagacagcaccgggaaggagtgcgtcttccacggcaggctgaacgacgggtgcttcttctgccaacgcagcaggtcgctcgccttctccagcagcgcgatcgggcagagcgccgtgatcttgatgcacacgctcgccgagcccggaggcagcgaggcggcgacgtcgacggcggagacgaacccggcggcgttgcggtcgcaggcgtggccgtcctccgcgtcctcgatcccgtagtcgaggatcccgcccatgcccccgcgccagaggcggcgcacg

SEQ ID NO: 129 - DNA, 905 bp, Zea mays
  misc_feature (25)..(25): n is a, c, g, or t
cttcacggggtgtcccagcgtactnccgcgtcggcgcacacgcgccggcgcctgcccttgcggcgcaccgcccatcagctgctataaaagggcggcacaccgggtctgagtagtcgtcatcaacgacagccccagacaacactcaccgatagcaagtagcgccgccgacgtttcgagagcagagtatccaagctagccaagcgcgcacctcggtgacctagctagctacctagctagttcaggcgacgatatggcgtcaggtcaggaaagcaggaaggagctggaccgcaaggcccgcgagggcgagaccgtcgtccccggcgggaccggcggcaagagcgtcgaggcccaggagcacctcgccgaagggcgcagccgcggaggccagactcgcagggagcagctggggcagcaggggtacagcgagatggggaagaagggcggtctgagcaccacggacgagtccggcggcgagcgcgccgccagggagggcgtcacgcatcgacgagtccaagttcaccaagtagtcctatcgcgtgcgtgcgtacgcagcgttcgtagctgtctgcgtagtgtaccttggccgtagctagtgctactctctactttggagtagctgaatgataataatgtagctagcagcatgcatgtaggcgatcatacatacgtacgtacacaggtacgtgtgtgtggatcatgtatgcttccagaagggtatcctagcttaatcagtcacgtcgtcaagtcgtcaatatggcaggttcgcgtcagggctttgtagtttgatagcctgtttcacgactcctcaataatcaagtagtgtaatgaaagtttggcggttccttgttattatctgcttgttgtatctcctgctctgcactggttaatttctcccatattgtggt

SEQ ID NO: 130 - DNA, 1714 bp, Zea mays
gcagaaactctttgcttccgcctggctcgcgatgcttgtttgggtgcgcgggctgcggcgaggtgaggcgacggcggcgccgggcggttgcatggtggccgatggagagtagacggggagggtcgtcggcggcggcggcggaagatgcgggcggggcgatgccgagctttgggccaacgcagcacgccattcgcgcagatgtgaacagcatgcaaccttctcgagttactgactttggggcactggcacagtctgctggattccgaatagaagatcttgctaaccttaatgcaaatgctttgttcaatctgaagccaaattctcatacgattgacaacagtcctctccagtttggaaattacggaaagtctatttcttctcatataaatactacagaagcaacaacagctgcaacaagaattgaccctcagctgtcagcacagcaaacaggagcacaaccaattctggtggcgttaccaactggtaacatggagaattggggagagtcagctatggctgatagccctatgactgacacatctacagatccagacactgatgagaggaaccagatgtttgaacaaggacttgttgctgtccccacagcatctgattctagcgacaaatcaagggacaaactagatcagaagacacttcggcgtcttgcccaaaatcgtgaagctgccaggaaaagccgattacgaaaaaaggcatacatccaaaaccttgagagtagcagactgaaacttactcagttagagcaagagcttcagcgggctcgtcaacagggtatttttatttcgacatcaggagatcaacctcaatcaacaagtggaaatggagctttggcatttgacatggagtatgcacgctggttggaggagcacaataaacatgtaaatgagttgagggctgcagtcaatgcacatgctggtgataatgatcttcgttgtattgttgatagcattatggtacattacgacgaaattttcaagctcaagggtgtggcagctaaagcagatgtttttcatgtgctgtctgggatgtggaagacccctgctgagagatgtttcatgtggttaggtggcttccggtcatctgagcttcttaagttactggcaggtcacctagagcctcttactgatcagcagcttgttggtatatccaacctgcagcagtcctcccaacaagctgaagatgctctttctcaagggatggaagcattgcaacagtcgcttgcagaaactctagcatctggatccttgggccctgctggaccttctggcaatgttgcaaattacatgggacaaatggcgatggctatgggaaaacttggcactcttgagaactttctacgacaggctgataatctacggctgcaaacacttcaacaaatgcaacgcatcttaactacccgacaatcagcacgagccctactcgcaataagtgactacttctctcggctgcgtgctttgagttctctttggcttgcccgtccaagggaataaattcaattaattcataactaggataatttttttgtactgtttctagtatggccattagtttcttcagaacgctcatgtgtcagtgagatatttggatcatattgtaggccatcatggtttactggacaactttgtaacaattttggagagaaaaaactgagttgtaaatacatctggaataatctaagatcttatgaaggggaaaa

SEQ ID NO: 131 - DNA, 883 bp, Zea mays
gcacgaggctgattcaactgctgactacagtagtgataatagaatatctttggatgctattgaaactatattctgtgaagtggatgagcttgggccccaggctatggtgaacaatactaaccattgtgactcatgcggtgagtatttgattcaccctacgatggtggcacgaggagctgaacagtacttagagctaaatgacctgtccttttcgctcaccgatggtcctgattcctgtggcgtgcttttctctaatggtgtatctgttgagcaactaccggatcttgagctcaggtttgagcagttctctcctgaccacatctccaataccgctattgcttccacatcaacaacggttggttcatctgcttcagtgcccttattggaggatcacaggacctgattcagaattggagtcatctggcgcacatgttaattgaatctaggaggatctgcaggacaaaggcataatgctccctttttttcaattttcatgaagttagaatttttttttggatgaaggcacggattagtgaccacttggcacagaaatatgtttgtgttgcggcttgtgaatccaggaccatttctctgcctgtagttttgcatggtagaactagatgggcaacaacaaaatgtgttcagtattgaataacgcactcactgcattaactactttgcctagcttagtatagtattctggatcttgaggcagggtagaagtgggggtgtgggacaatgtactcacagcttgttgtcatttagcagcaatatcttgtttcggtaacctgtggcaatatcttgtttggttacctggatttgctagtgcccaggcaagatgatgttttcgttgacgccataataataaatagcaatcgatttt

SEQ ID NO: 132 - DNA, 762 bp, Zea mays
taacctaatattgtagttggcgcaccatcgtctgctaggttacttgaagctggtagtcagttaaattgtgttgttttaccagatggtcaggctaagagtagtactattggaaagggatttgtaaggattttggattcgatctctgctcccccagcttttgcaggagagttcccagctaaccaccgcaaatccttggctcgtatttctggagcgcgccccaacacactccatgtttctgctgaagtgatccatataagaagtttagctgttccttctggcgcagataagtgggcgctgcaaaaggatcaaggcatggagctgctcttctctgcagattttgaacccgatgcccgtatacattgtggctgcaacaccattaccgcggtgctgagaaatggcttctgccttttcttcgtttcagcaataatgctcttagtgagctacgaggtgggcatgtgcatctatgacaagtagcagcctggtactggtctaagataaatctcacagcatttaggttaatcctatgttttgaggcagactcaactggagcctcctgctagcttttaagtgtgccgcattgcatggcacggacctgtggggtgtttagcactagcagtaccattttgcagctcgagagctaatggtgtatgtatgaattcagtgctatttagaaatagtatgagaattgcctcgttggcgtgtgatcatgccatttgccatgcttgtggtcgcagtggtcaatgttagtgcaaaatattgtat

SEQ ID NO: 133 - DNA, 1451 bp, Zea mays
gcggataaagtaacaaacagataagttgatgcaggcaggggtcttgcagcagcaagacaaactggaaagaaaaaaaaggcagctgaagctgcatgaatacatattatcaaccatgcaggaacgagccctcctcggctgcattgcatagaggaatgagaacgatccagacaggttcgccaagcaatggatttttcatgtttcagcaaaggtctagatgcaacaatacaggcgcaatagtcagactttacaaactaaaagcttaaagcctgcgcatcccgcatctgaatatttctgtcactccagcatcatcagaccactacgaacgaatcaaatctgtacaagacggaggagccacctccaatgaatgacaccaaccgagcacggagcacggtctatcttccagagggcagcaatgagttgtcggatccctggccgagcagggacgcaggcagaggaagccacgggcctcccggtgcggcagcctccttggcaatagcttcggcgagggggacgaggccgcccggcttgtcgtaggtgaagtgcaggtccctgttctcagccaaggccatgagctccgactcgtccagcccccgcgcaggcccgaggctacacctctcagccccgtgcttggcgagcgcgtccttgaacttgttgatcgttgcgttggtgcagctgaagctgctgacccggccctcggctccccggtagaacctgaagaaagggaggacgtggacgcggaggctgtagcacatggacttgtgcgtctcgtagttcacctgcaagaactgcacgcccgggttcttctcggcgaactgggcgatcttggggtggagggcgcggcagccgccgcagcctggggagaagaagtcgacgaccacgagcttgtcgccggcgctgagcagcgagtcggccaggtcctgcgcggactcgacctcgcgcatgttggggtgcagccccttcttccaccaccgcatggctttggggaacgacaggttcatctgtcctggcgcggcggcctcgaggctacgcgacaggggcctcggcttgctgtccttgaccgacatcctcccggcggagaaggaggtcttgctggcgtgcccggcgacctgcagggactccgcgagcgcggccctggcggcgcccctggcccggccggcgacgtcccggccgcacggggacgccacgacgccgttgcacaacgcgtcagccatgaccggccaaatgaatctctcgggtcagcgacagcgagggcggctgaggcagcggagagagagagagagagagcacgcgagcgaataggagaagagaggggggtgagctcgaggaaggagaagcggcgctggtgctgcgaatgcaatggcgggtgtgcgactgcggatgcggagacgagggggagaaaagcagagcagcgggccctttttttagggcacaagacagaaagagagggcgca

SEQ ID NO: 134 - DNA, 1374 bp, Zea mays
acgagcagagtaccagacaccactgcgcatcagtgcaaagaggtagctaccctatctgccatggctcaagagctccacgaaacgtcctcttgctctgccaccaccacctcgtcgtgcaccacatcctgctgctcgtccactgtcacagactcgtcctcttcgcccccgtcaccggcggcggccaatgccgcgcccgcgacacggaagcggcaggcgttggaggccgaggccgaggccgaggcgggcggtgaggaggaggaggaggaggaggaaggctgtgctggtaataaggcggcgccggccaagaagcgaccgcggggcagcgaggggaagcacccgacgttccgcggcgtgcggatgcgggcgtggggcaagtgggtgtcggagatccgcgagccgcgcaagaagtcgcgcatatggctcggcacgttccccaccgccgagatggccgcgcgcgcccacgacgtcgcggcgctcgccatcaagggccgcgccgcgcacctcaacttcccggacctcgccggcgcgctcccgcgcgccgcgtccgcggcgcccaaggacgtccaggcagccgccgcattggccgctgcgttcacgtcgccgtcatcggagcccggcgccggcgcgcacgaggagcccgctgccaaggacggcgccgcgcccgaggaggcagccgccgacgcacaggcaccagtaccagtagcactaccaccgccggcggcctctcggccagggacgccgtcgagcggcgtggaggacgagcggcagctgttcgacctgccggacctgctcctcgacatccgggacgggttcgggcgcttcccgccgatgtgggccccgctcactgacgtggaggaggtggtcaatgcggagctgcgcctcgaggagccgctgctttgggagtagcggtcagagatgctcgttgcctgcattgcaaacgaggtctaaacaatagtagcagtggtatcccatttcttcttcgttttgcttctcgccctctcctttttttctctctttcttgcttactttggggggaaaacagctagttctttttttcttcttcttcttcttcttttattaaattgagttttaataagtataaacatatataaacgagagagagatataagctgtgtacttaaaagtgtaagacgagtacctatcagttcattactacgtatctactagtggtaccagtagtgatcatgttgtcccggccgtgtgtgaattccagcggtagttgttgaccttgctagatttttatagttgcttgtgttgtgtgctgtaccaaaattccccagggaaaaagggcaggaagcaaacgaatgtaacgggaacacaagcagcatctaatctctattactgctgacaacg

SEQ ID NO: 135 - DNA, 1423 bp, Zea mays
gcaatcaatttcccgtgacccgtgtccgtttgccttagctttcatttcatatatatatatatatatatatacatgtcagtctctccccctgcagccttcaccttccacttcagcttcattccacttccacttggatcgatcgatcgcatatggcggtactgtggtggtggtcatcgtcctgcttgtcctcccgcgccgtcgctgctgcgctgctttgcctgctggtggctcacggcagcgatggaaccaggcacaacagcaacaatggcggtggtagtggtagttccagcagcagcaagagccacaagcaaggcggagggggacgagcccatgccgcgccgacgacaccgtctccgtatccgtctccgtctccggcggctggcaacaacagcagcagcgacgacgggtggctgaacgcccgtgcgacatggtacggtgccccgaacggtgctggtccggacgacaacggcggcgcgtgcggcttcaagggcgtgaacatgccacctttctcggcgatgacgtcgtgcggcaacgagccaatcttcaaggacggcaaaggatgcgggtcctgctaccagatccggtgcaaggcccaccctgcgtgctccggcgtggcggagacggtgatcatcacggacatgaactactacccggtggccccctaccacttcgacctgagcggcactgccttcggggccatggcaaaagacgagcacaacgacgagctaaggcacgcaggaatcatcgacatccagttcaagagggttccctgccagtaccctggtctgacggtgaccttccacatcgagcgtggctccaaccccaactacctggcggtgctggtggagtacgagaacggcgacggcgacgtggtgcaggtggacctgatggagtccagccccgacgacggcgagcccaccggcgtctgggagcccatgcgcgagtcctggggctccatatggaggatggacacccgccggccgctgcaggggcccttctcgctgcgcgtcaccaacgagtccggcaagacgctggtggcggaccaggtcattccggcagactggcagcccgacaacgtctacagctccatcgtccagttcgagtagcagtatatgccatgcgtcgtacatatagatatatatacactacacacacaacgcggtgtcagcagtaatttaagcaagtatatgcatcatcattaattccatggacggatcggatcgatgatatatatgtacgtaaagatagacaggcataagacgacgtctctacctagctagctatagctgctgaatacatacatatacttgtcgatcgagacgtcgcttgtgacgtccgtccagtgcattatgaatcatcttcgatcgatctgttgttggattatacatgctatatattcgtgataaagctttacccaactatt

SEQ ID NO: 136 - DNA, 1475 bp, Zea mays
gcacccgttataatctatacggttcaagggaccgaagaaggtagagagagaaacttgaaggggagaggaaggagatacaggttcatgttcatttaggtgtcagttcatctgatttctcagaagcaaaatgttgtttggagctcagtgacaccatcttgtaatgcatgtgccttttacgggaaatggaggatcattatgtccatcccaagtctaagtctaaccatggctccttgtcaggaaatggttatgagatgaaaaatccaggccatgaagtttgtgatagggattcatcatcagagtctgatcgatctcacccagaagcatcagcagtgagtgaaagcagtctagatgaacacacatcaactcaatcagacaatgatgaagatcatgggaaggataatcaggacacattgaagccagtattgtccttggggaaggaagggtctgcctttttggccccaaaaatagattacaacccatcttttgcttatattccttatactgctgatgcttactatggtggcgttggggtcttgacaggatatgctccacataccattgtccatccccagcaaaatgatacaacaaatagtccggttatgttgcctgcggaacctgcagaagaagaaccaatatatgtcaatgcaaaacaataccatgcaatccttaggaggaggcagacacgtgctaaactggaggcgcagaacaagatggtgaaaggccggaagccataccttcatgagtctcgacaccgtcatgccatgaagcgggcccgtggctcaggagggcggttcctcaacacaaagcagcagccccaggagcagaaccagcagtaccaggcgtcgagtggttcaatgtgctcaaagaccattggcaacagcgtaatctcccaaagtggccccatttgcacgccctcttctgacgctgcaggtgcttcagcagccagccaggaccgcggctgcttgccctcggtgggcttccgccccacagccaacttcagtgagcaaggtggaggcggctcgaagctggtcgtgaacggcatgcagcagcgtgtttccaccataaggtgaagagaagtgggcacgacaccattcccaggcgcgcactgcctgtggcaactcatccttggcttttgaaactatggatatgcaatggacatgtagcttcgagttcctcagaataaccaaacgtgaagaatatgcaaagtccttttgagatttgctgtagctgaaagaactgtggttaggttatgagtttcttcctggagactgatccatacatgacatgctacctcgtgctgagtttctgaggtgaagccatcgaaacatgaccgtgtggttcagtacccttgctgccttcagtgtctgataagctagctctccagtttgcagtttctctgaattccagcatgtctagtctctgcttatcttttgcatgtaacgtgatggtgacttagcatacacatctattcatcc

SEQ ID NO: 137 - DNA, 720 bp, Zea mays
tgctgtcggcaagcctaacaacacatttcgattcgatccactgtttcttgttgcagcattggtaaaatcaaacatcaatcttttttttttttacttctctctatatttttttcctctaactgcaagtgtcagtatttcgggggagataaatatgttctcctgagaaaggtcatggtgtagtgaattaccctgagcgcgttgttggtcttcttgcgtgcggcggccgagcggtcgacgtccgcgaggcggtactcgtgcatgatccagttggtcttgacgcccttgggcggcttcccggcgtagaagacgagcgccttcttgatggccacagggcgcggcgaccctaccggcttgtcggcgccggtggccttccagtaccctgtcccggccgcccggttaggcctggagccattcgggtacttgcggtcgcgcggcgagaagaagtaccactccttctccccaccgaacgccttctctgggagctgccatgggtcgaacttgtagagatccacctcggcgatgaccggcgcggcgagcggcaggccgccgcacttgcggaggagatagtacatcaccagctcgtcatcggtggggtggaagcggaacccaggcgggagctgcagcgcgccaccgcagtccattcgatcgatcacctagctagtggcaacaggcggccgggcggattggagcttcgaaacgatcgaggacctgccgatcgct

SEQ ID NO: 138 - DNA, 636 bp, Zea mays
aaatacgggataaatatgggttaaatatgaaaaaacgggattctacacaaaatgtacggaacagactctcgtttccgttccatttctagattttttcgcaaataagaaaacatacaggtcaaatatggaaaacggtatgggtcgggacagagttttttttcatcccttttcaactctactcacactttattcggcaattcaagaccttttcagttcagaaagaaatggaggcccatcgcacatcattttttttctggtcaggttcaactgggagcaaaacatcaagatgatgcctcctggctagtaaacctgacgaggtaggaaattatctccgaattcaccctctcggcctgttcttgctggagaaaatggtggccttcaatgacggcgacttcaagatctgggacagtggacttgaattccccactcttgatgtacttctcaaccccaaaggactggacaccgatgtccttatcaccagctatgaacttgacaggcactgtaatcttggcctccttccagggtgcaagaagtctccaattcgtctcccacatgcggtagtagttgaggggtccagtgaacccaaacttccgaaacttttcggcgtactggcccaattcttcctcgctgatccaa

SEQ ID NO: 139 - DNA, 1456 bp, Zea mays
caccaaaccgcggagaaatttagatgcacaccgcccccgagttgtagttgtagccgactataaatagttgggggctgggagggcgagctcctcactgccaaccacacgttcccaagccagccattggttggtagcaagccaagctaatcaagctagctttagatacccgctcccgctcttcttccctccgacgaagtcagctgacgatatatacagcaggctagcttcggagttcggggcactcagcgatggccattgccggcgctcttctcctcctgctcggactcctcgcgcgggaggccgctgccggcgggtggcagagcgcgcacgccacgttctacggcggcggggacgcgtccggcacaatgggcggcgcctgcgggtacggcaacctgtacagcacggggtacggcacgagcacggcggcgctgagcacggcgctgttcaacgacggcgcggcgtgcgggtcctgctacgagctgcggtgcgacaacgacgggcggtggtgcctgccgggcaccatcaccgtcacggccaccaacttctgcccgcccaactacggcctccccagcgacgacggcggctggtgcaacccgccgcgcccgcacttcgacatggccgagccggccttcctccgcatcgcgcagtaccgcgccggcatcgtgcccgtcgcgttcaggagagtgccgtgcgtgaagaagggcggcatccggttcaccatcaacgggcactcctacttcaacctggtgctggtgaccaacgtggcgggcgccggcgacgtgcgctccgtctccatccggggctcccgcacggggtggcagcccatgtcccggaactggggccagaactggcagagcaactcgtacctggacaggcaggcgctctcgttccaggtcaccgccagcgacggccgcaccgtcaccagcaacggcgccgtccccgctggctgggcagttcggccagaccttcgaggggcggccagttctgaggatgaacagctagcgcgcgcgcggctagctattggataattagttacggtactgtcgatttgtttgttttttttttttttttttgcgcgtgatgatcgagtgcatgcaagagaaagagacgacgaggagaacgacgaagacgaagacgaagcctctctccgggtatattgaaggaaggagaaggctttgcgcgcgctatgctgaggctgctaatctagcacccgcctagacgtttcccttttctcttctctgggggattacggactggatcggaccaaagatcgatccagctcctagtactaataatatagttgtacttgagaaaaatgaaataattgtaatttattgtttttttggggacctttgatattattgtactcgcgcgcgccggccttgcgtggaaattgaagttcgcaataaggccggccgccggcttttattcagcgtgccctctcgtcccttcagtg

SEQ ID NO: 140 - DNA, 735 bp, Zea mays
ccgtgtggtcatggtgctggccatcgtggttggcgtattaatcggactagctatgattttggtgcgcaatatctgggggtatgcatacagtaatgagaaggaggtggtcaaatacatctccaaaatgatgccgatcctagccgtgtcattcttgttcgattgcgtgcagtgtgttctttcaggtgttgctaggggctgtggatggcaaaagattggggcttgtgttaatcttggtgcatactaccttataggaattccagctgccttctgtttcgcctttatgtacccatctaggtggaatgggactttggttgggaataatctgcgcactcgtcatacagatgctattgcttctcacaattaccttgtgcagcaactgggagaaagaagctttgaaggcaaaggacagagtatttagtacatccgtaccagctgacatgatgacatgatatttctgaagatatttttttgaaggaaatgcccatgaaactttgccaaggaacatactaagaattggttgttcagattcaaggcctttctccatgccatcagaatgatgcttgggtctagtaatagctcctgagcagtctgttttttacttttggtcaatactcaatacatggaagatgtttggtttgaagaaccacgccatcctagatgaggtggtatgattataagttgatataacggctccatactagttattgaggaatgagacgatgattatctcatgta

SEQ ID NO: 141 - DNA, 524 bp, Zea mays
atcgacgagcgccagccgccagcagccgagccggagcgaccttttcttttttcttttacacagcgggacggagaaaggagtcaatcagccaaagccacccaccgcttttacccaccgatcggcgttaccaccgctagcattgtcggattcagctccatccaaatccaccgccagcaagcaagcaagcaagccggcgccatgggtctgccgatgaggagggagagggacgcggaggcggagctgaacctaccgccggggttccggttccaccccaccgacgacgagctggtggagcactacctgtgccgcaaggcggcggggcagaacctccccgtgcccatcatcgccgaggtggacctgtacaggttcgacccctgggacctgccggagcgcgcgctcttcggggcccgcgagtggtacttcttcacgcccagggaccgcaagtaccccaacggctcccgccccaaccgcgccgccggcaacgggtactggaaggccaccggcgccgacaagcccgtcgcgcc

SEQ ID NO: 142 - DNA, 572 bp, Zea mays
agaacaggcagagtatatataataataaaaatacataatatttatatatacacacaagtggacaagtaggagggagagggaacagaagcattggagatcgatgggtcggtcggtcgatcgcgcgtgactggctagcataggactcatcccatactacaattattactactaaattaacacatgcatatgcatgcatctaatctgattcttgctttcacacaccacttgcatgcacttgcagcatggaccattgcatgcatactgatactgtcccattaatcctatatacacacatgtttgcatcttctggatcatcgatcgttcgtcctatatgttcaattgacctcctagatcttcagctgtttcagcctgtcggcggccccgtagccggcggggtagcggtaggcggggaagggcaccttgccggactcgatgtggccgacgtcctcctccagcagctcgtagtagcgcctgacgtcgtccgcggacttcccgccgccgacggcgcaggcgatgttgtgccagcggtcgggcgtgtccttgtcgtacaccgccagcgcctgctcgaacag

SEQ ID NO: 143 - DNA, 1621 bp, Zea mays
cccatgctgatctcggcgcgcttctcttcctcctcccccagagccgggcactgatttcccttggctgctgctgctggattctttggtgttccatcaggccaaggatcccgcaaagagctccggagccaagcctgctgcagccgtcgcgtcgggtgaggcaggcttcagcttcagtctcctactcgacgaggcaagcggatcggagcgggcctccgctccgccatgatgagcttcaagggccacgaggggtttggccaggtggccgccgccggtgccgggagccaggctgcctcccatggtggagcaggcccgctgccatggtgggcggggccccagctgctgttcggcgagccggcgcccccgtcaccggaggagacgcgccgggacgcccagttccaggtcgtgccgggggttcagggcacgccggatccagcgccgcccaagacagggacacctgaggtcctcaaattctctgtctttcaagggaatttggagtcgggtggtaaaggagagaaaaccccaaagaactctaccactattgctcttcagtcaccgttcccagaatacaatggccgtttcgagattggtcttggtcaatctatgctggccccttccaattatccttgtgctgaccagtgctatggcatgcttgcggcttatggaatgagatcgatgtctggtgggagaatgctgttgccactaaatgcgacagctgatgcacccatctatgtgaatccgaagcagtacgaaggcatcctccgccgtcgccgtgctcgcgccaaggcggagagcgagaacaggctcgccaaaggcagaaagccctatctccacgagtcgcgccacctccacgcgatgcgtcgggtaagaggcaccggcgggcgcttcgtcaacacgaagaaagaagggcgtggcacgggcgttgcttcgaacgggggcagcaagacggctgcagcggcaccgtcgcgcctcgccatgccccctagcttccagagtagcgtcgccagcctgtctggctccgacgtgtcaaacatgtacagcggcggcttggagcagcaccttcgggcgccgcacttcttcaccccgctgccacccatcatggaggacggcgaccacggtggtccccccacccgcatctcctcctccttcaagtgggcagccagcgacggctgctgcgagctcctcaaggcgtgaaccgacgaggaggaggggatggctactcagacgaacggccttctcgccgatggctggtcgtctgtaggcaaatcattcttggctgttccgcattggggtgcaacctcatccacatcatctacctacccagtaggccagtaccccctgttccctgaacagtgcttgggttacaggggtcctcctgtgtgtgtgatgatgtggtgtgcctcccccacatgcatttgctgtaacataatagtgtacccaaaccactgcttcggactatcattgtctgtctcggtatggattctctgttgtcacagtgtctgaataattgaggcgtcagacttcaaagttgctccggttcttggagatgggtatgtttgaagcttgcttggaggtctgaaactttgtgcttggtcactcaagaatcaagatgctgagttattgc

SEQ ID NO: 144 - DNA, 828 bp, Zea mays
gtagtgaacgtttcacatttcaaaaatacctataactgtgaatacgctagttaataattgcacaaaaaaaggcagagggccattgagtattttcctcttgacacagactacacggacaaagctttggtcactccacagcaaaacctcttctcttttacagagctgtagcctggtgattgcatcttgcaccaataattacaggatgagggcgtgtctacttgccattctgtgtaaaatcatgacaagccgaggaagctgtccaccttggcattggtcgatctggacaaaaacttcatgcaaatggggggctgcaccttggcgagggccagaatggactgcggcagggtccagatgccgtctccgcagatcagccccgacgcgaccgcaggtccgaatgcgtccgctttcgccttgttcagccgctcccacacgaagaggatcgcgctgcccagaaacatgtcaatggcgaagtaggacccgatgtagaacggaatcgccattgccattggcagcgggatgaacctcgacaccttgtagggggtcaggtccctgacaaggttgatagtgatcgctgccgcaaagaaaatgtagcagagggtgaggcagtttttcgggagcgagccgaagccatccacgccgaggatggccatgttgcggtacacgatggcatagggcgccgggtactcggtgccgctctcgccaatgtcaccgaacgccttgtagaagagccagaagatgcagggcccgatgacacaccccattccggtgccaatcacctggctgatgaacatagacctcggtgacgccagcgtcaggtacccggtcttg

SEQ ID NO: 145 - DNA, 953 bp, Zea mays
cgttgctgtcggcaattgtgaacgcagatcccccttttccctctcaagactgactaatcgtgcttgagccctttcaacttcatccatcagaaggctgacttcaacctcctttgcagctcgatcctcctctgattgagtgcgaagctcaaacaattggctttgcgccgattcatgtagcttttgcatattctttacactttctgtagcttgccttagttggtcctgcaatgaccgttccctatctttcagggcttctagagttttctgactatcctcagccatgcttcgctgcttcatttcaaccatctcccttactttctcctccatctgctgttccagttggcgattacgctcttcaagtcgcctaattgttgcctgctggttcttcaagtgtgcagcttcagcacggtattcttcaagctctagtttcatcttacggttctcagtctccagttcagacaatttctggtcttgatcagtcattgaagcaagagctggatatggatcaggagcttcatagagcttctgatagatgttgagaaatgcattttctccaaactttgctctctttgtgaggttatcaacttcctcttgataactcttcagcaaagaattgagtaaactgagtttctcatctgatgatgcctttttgaaatcccgtgtgttctcagcaagcttacgcctgttcttttgactagtttgttgattctccgcaatctttaaaccttgctcatccaatccacttctttcgttgctcgaaatcaaaatctttccagaaactgcagacgacggcaagcggcgatgagatcgtcgctgcggtagacgactgggacgacggtggcgggggcggaggcggcgagcggtcgcggtccgacgcgcccgcgtgcgccggcgagggctccatggggatatgcgcaggggttcaggccttcggccttcggggatcaggacac

SEQ ID NO: 146 - DNA, 539 bp, Zea mays
cttggcttgtcgtgccggcccttggttggctagctggggcggcggccgctagctagctgctgacctcgtccatgtccgagctcgacgacgacgacccgtccgtgacgcagctgctagcggacgacggtgacggtgacaccggtcgttgcctcctcctcctcggcctgccgctgcccttctggaagacgcggcagacgacccactctccctgagcctgggccaggctgcagccgtgcttgtgcagcggcgcggcgaggcggtactcgtgcatgacccagccgatcgccagggccgccgccgacgccgccttcttcttcttccgccggggaacgaacgccatcgccctcttcacgcccaccaggaggctcccgccgccgcacgggcggggcagggccaccggcttctccttccccgccggcctccaccgcccgctcgcggtcgccctcctagcacttccgacgccgcccgccggccgcaccgcgaagaagtatctctcgccttggctgctcgcatctggatcgatcgtagcccaacacaat

SEQ ID NO: 147 - DNA, 1447 bp, Zea mays
ccgagctaaccaccatcgacgagcgccagccgccagcagccgagccggatcgaccttttcttttttcttttacacagcgggacagagaaaggagtcaggcagccaaagccacccaccgcttttaccaaccgatcgtccgatcggcgttgccgccaccgctagcattgccggctccagctccatccaaatccaccgccagcaagcaagccggcgccatgggtctgccgatgaggagggagagggacgcggaggcggagctgaacctgccgccggggttccggctccaccccaccgacgacgagctggtggagcactacctgtgccgcaaggcggcggggcagcgcctccccgtgcccatcatcgccgaggtggacctgtacaggttcgacccctgggacctgccggagcgcgcgctcttcggggcccgcgagtggtacttcttcacgcccagggaccgcaagtaccccaacggctcccgccccaaccgcgccgccggcaacgggtactggaaggccaccggcgccgacaagcccgacgcgccgcgcggacgcacgctcgggatcaagaaggcgctcgtcttctacgccggcaaggcgccgcgcggggtcaagacggactggatcatgcacgagtacaggctcgccgacgccggccgcgccgccgccgccaagaaggggtcgcttaggttggatgactgggtgctgtgccggctgtacaacaagaagaacgagtgggagaagatgcagctggggaagaccgccgtcgccggcgtcggcgccaccaaggaggaggcgatggacatggccacctcgcacacgcactcccactcccaatcacactcgcactcgtggggcgagacgcgcacgccagagtcggagatcgtggacaacgacccgttcccggagctggactcgttcccggcgttccaggacccggcgatgatgatgacggtgcccaaggaggagcaggtggacggctgcagcgccaagagcggcaacctgttcgtggacctcagctacgacgacatccagggcatgtacagcggcctcgacatgctgccgccgcccggggaggacttctactcctcgctcttcgcgtctcccagggtcaaggggaaccagcccgccggagccgccgggttgggacagttctgagctgagtcgaggatggagccatggatcaggagatgaagacggttgcgaactctgtaaatacagcataggagtcgaacctgaccctgacccttgttggggttacaaggttttccgagtgtcggtgtagcgtacatggagccggcggcgcggccgggccggctcattctttagtttcacttccaaagcagacggtagatatatgtgtagctgttcacttaaactctcttcgacagaacaaccgacgaaattttgctcttgtttataagaactaccttgactgtcgctttcccttg

SEQ ID NO: 148 - DNA, 1065 bp, Zea mays
ctcagctcaagctcgagacaagaaaccagaaccagctcactcctcactccacttccactcccaacagcaagctcaagcagtcagtcaccgccggcaggggtcagggtcacagtcacagcagcagccatggacacggcccgcctcgtccagcacacgacctcctcgtcttccacctccacctcggcgtcgtcgtcctcgtcctcgtccgagcagcagagccgcaaggcggcgtggccgccgtcgaccgcttcctcaccacagcagccgcccaagaagcgccccgcggggcgcacaaagttccgggagacgcggcacccggtgttccgcggcgtgcggcggcggggcgccgcgggccggtgggtgtgcaaggtgcgcgtcccggggaggcgcggcgcgcggctgtggctcggcacctacctcgccgccgaggcggcggcgcgcgcgcacgacgccgcgatactcgccctgcagggccgcggcgcggggcgcctcaacttcccggactccgcgcggctgctcgccgtgccgcccccgtccgcgctcccgggcctggacgacgcccgccgcgcggcgctcgaggccgtcgcggagttccagcgccgctctgggtccgggtccggggccgccgacgaagcgacctcgggcgcgtctcctccctcctcgtcgccgtcgctgccggacgtttctgcggctggctcgccggcggcggcgcttgagcacgtgcctgtgaaggccgacgaagcagtggcgttggacttggacggcgacgtgttcgggcccgactggttcggggacatgggcctggagttggatgcgtactacgccagcctcgcggaagggttgctcgtggagccgccgccgccgccggcggcctgggatcatggagactgctgtgactccggagctgcggacgtcgcgctctggagctactactagcaaagttaacaataataagcttgacagccaaccccaaaagccccccaactgattgtattcacctctgtaacaaaattcaaattgatttcccagcaaatgaacttcaaaagaagtctttggttccgattt

SEQ ID NO: 149 - DNA, 652 bp, Zea mays
gatcatggccgaccacaaggaggagcctgtgccggagtctgtgatggacaagatcaccgagaagttccacggcggggactcgtcgtcgtcgtcgtctgactcggacgacgagaagaaggggtcctcgttgccgtcggcggcggaagccatgaaggccaagatctaccgccttttcggccgggagaggcccgtccactccgtcctcggcggcggcaagcgtaagaccccacgatttgtatacccgattcgttcctgttttttttagatccgatccgatctagttatatctgtgcttgggcggtgctaccttggactggtgcaaaatagttcgtcacttcgttaataagctgcctttttatttgaaactggaaagtgcttggaccgtggttttggcatctgtagcgtatttgctaagtaactcgacgatttccctttgacttgatcagctatagcggtcagcggcggcagcttgtcctcacccttaaaccctaacacgcgctgttcgatctcgacttgggaacggatctggaatgtttagttggctgttcacttgtttactactgtcttgcgcgcgcccatgcgcgcgtggtgttgtgtgtgtgttttgtaattttgcaatgtttggatttaatttataatttacatggaatgc

SEQ ID NO: 150 - DNA, 397 bp, Zea mays
atatataatatgggcacaagagcttaatggaggatggagcaggtacgtagctagcagtagctcccctgctattattcgaattaaatctgacgcaagtaaacttcgatagcatcgacgagcctggttcccgcccgcgcatagaatcccacgatgctgctgccgatgggcgccgtgatcccgcccgcgcatagaatcccacgatgctgctgccgatgggcgccgtgactggtgacgagcctgagcgaggtcagcgtagtggcaccttcaaatgcgccgtatgttcccgagacttccctgacatcctcggcgtcgcaaggtcgatcgttcgaacattgcccccgagtccaccccatcgcccagcgggcgcgctctgcccagcgctgtcagtataggtgaa

SEQ ID NO: 151 - DNA, 574 bp, Zea mays
  misc_feature (481)..(481): n is a, c, g, or t
  misc_feature (486)..(486): n is a, c, g, or t
  misc_feature (501)..(501): n is a, c, g, or t
  misc_feature (525)..(525): n is a, c, g, or t
  misc_feature (533)..(533): n is a, c, g, or t
ggacgggtcaatgcaagtctgaacttatctaggggtataggtgacatggaactgaagcaaaatgacctcctgccagtggagaggcagatcgtgacagctgaacctgaattgaaaacagtccagctctcggaggatgatgaattcattggtttagcttgggatggaatttgggattgcatgtcaaggcaagaagtagttgattttggacataaacagctaaagaccgaggataagatatctagggggggggagaagttgctcaaccgctgggtggcacctacatctgggggcgaaggatgggataacatgacggttattgggggtcaattcaagaaaccagctttagctggtgctacttctagcgctgagcagtctggtaccactgcagaagggatgcggcccaaaatttgagttgcctttgtgaacagcgaggtcgatggcccagattaccccccgaagtaggcgttgagtggcacaccgngctgnggagctctaaccggnggataatagacaaaaaaggatagngagggggnggatataagaaaagggattctattcgacaatctcttatagg

SEQ ID NO: 152 - DNA, 338 bp, Zea mays
catccacttggtttggcttggattggtacaaaggcggacacgggcacgggctatacatatatatagagtatgcccatgcatgcgtgctggtcttggattatttctcgatctttgttcctggcgacgacatgcatgcgtttttattattattgagcacaagcatgatgcatcacatgtttggcttcatggtgagccgggggggaaacttcatccccagcgacgcgtcgcacttggggaggagggctatccagatggacctgagctcctggctgacctttgggggtccgagcgagtcggggaatcgccttacgaatcgggcctgtcgggcggggtcccag

SEQ ID NO: 153 - DNA, 575 bp, Zea mays
ttttattttaaagaagagcacaggaatgctcatttccgaacaattcaaggtctcgttacaagcaagcatgctcacacataggcactcaactttcgtcatagaagacacatcactgaacaagcaaacaacccagaacagacttggcttattccattcaccgattgacagggcaaccgtttcaagcagatggcttcatcagggcagcgaccttctggacagacggcctctccatcagaccagaccaccaggccttcacatgcgggtaggcgtcgagcacagatgcgtagggcgtagcaaacaggcagagagtgacagacacatggttcaggtcggcgaggctgaggaagtctccagcaaggtacttgcacttggtcaggcgtgcctcgtacacctctagcaccttcttcagcttctcaaggttctcatccacaactttctggtcggtcgagtttttttttttttttttttttttctgtagggatttcagcatagaaatacgaaaaaggcccacgattacaagatgcaggcgcataacagcacaatgcaggtccatcagttcatcacccatgcgcacg

SEQ ID NO: 154 - DNA, 623 bp, Zea mays
gcggccgccgcagcgtctgcacagcgtcaccgttcgtgctggcgtcgccgtcgactccatcgagttcacctatactgacagcgcttggcagaggcgcgccgctgggcgatggggtggactcgggggcaatgttcgaacggtgagcagcatgcagtagtcctccatcgtatcatccagcaacctcttcatgaagcataataatgcatgtccatcatcattcaattcgaactctgcatgcgtacgtgcagatcgaccttggcgacgccgaggatgtcagggaagtctcgggaacatacggcgcatttgaaggtgccactacgctgacctcgctcaggctcgtcaccagcagcagaacctggggcccctggggtgtcgagaacgggacgcgtttctccgtcacggcgcccatcggcagcagcatcgtgggattctatgcgcgggcgggaaccaggctcgtcgatgctatcggtgtttacttgcgtcagatttaattcgaataatagcaggggagctactgctagctacgtacctgctccatcctccattatcctttatttcaattcgctcatcatcgtcgtgtgtaaattaaataaataaagctcttgtgcccatattatatataa

SEQ ID NO: 155 - DNA, 468 bp, Zea mays
  misc_feature (145)..(145): n is a, c, g, or t
  misc_feature (419)..(419): n is a, c, g, or t
ttatataaacgtgcatgcaataataagaaatcgatgtgctatatgtatatgcttggtgatcagcgcgcgcccctgcagcgttctatgggctcgcacccgcgggtgtatttattggcgttggcgacggggcggtacaggtccttgntctttccgtttggctcgtcggcgacaatcgcgtcgtagttcaacgtgctttttttttttttttttttttttttaacaaaagcatactctttttttccataccaattatacaacaccaccacaatacatctatctctcgggcacatagcaaatgacaatgtcgtccggctcaaaatggcgtcagcgcacagcgtcacggcctaaaccataatctccagcgtccaccgatatagctcctgctccggcacgggcaggtcgacggacaagaggccggngtcggcatcgtagctgaactccacttccgccgagtccaataggcacctc

SEQ ID NO: 156 - DNA, 954 bp, Zea mays
atgagcttgatcagcatgatggaggcgcggctgccgccggggttccggttccacccgagggacgacgagctcgtgctcgactacctctgccgcaagctctccggcaaaggcggcggcggagcgtacggcggcatcgccatggtcgacgtcgacctcaacaagtgcgagccgtgggatcttccagacgaggcgtgcgtgggcggccgcgagtggtacttcttcagcctgcacgaccgcaagtacgccacggggcagcggaccaaccgcgccacgcgcaccgggtactggaaggccacgggcaaggaccgccccatctccgtctccggccgccgcggggccggcgacaccgccgcgctggtcgggatgcgcaagacgctggtgttctaccagggcagggcgccccgcgggagcaagaccgagtgggtcatgcacgagttccgcgtggacggcccgcccgttgccgaccgccccggctcacctctcctccagctccagctccaggaggattgggtcctgtgcagggtgttctacaagagccgaactgccagcacaagaccagcagcaggccccgacgaggccgggccgctgtccagccagctgatcggcggcctgccgatgccgcgaatggccgcccctgctgacgccgcctacctgtccttcgacgtcacacctgccgctggcggctactaccaccaccaagactccggccccgcggacgcgcgccaccacctgccgccgccgccggcgcagcctttcagcaggagtagcctgtccagcttgcgggacttgctcagcagcatggttgaaggcagcgacgccgccgccgccgttcgggagacggagctccacctgcagctggagggctggaccgaggcggcctacgcgcagcagcagggcggcgccatgccggcgcacccgcagcagacgtggagcccgtttctgagctcgggatga

SEQ ID NO: 157 - DNA, 1447 bp, Zea mays; identical to SEQ ID NO: 147

SEQ ID NO: 158 - DNA, 1531 bp, Zea mays
cgcaaaataatcaaaataacataatccctattttccccttccattttttttccggaagagccaacacagctacaatatatactgtaaaatatatattgtaggagtaagtacactcgaagcttggcgatgacgaatatggcctgcactacctaccaccagtacggagactgcaactacaagcccttacaaaattactagtacttattagtataataactaatcaatgaaggaacagaaaccctgcactgaaccaatcatgtacagtatgtatatgtacagccacacacacacatgccgcgcacgatccaccacacccgatgcactgcgccatccgtctccgtctccgtctcccttccggcggggccagacggtctcattgccgcctctccatgtaatccagctatagtttcatattatatcctccttgcaagtcaacaatggcggctcgcctgagtcaaagcccacaccgtgcggttgcattgcattgcgctgcccaagacagatcaatcaaccaaccaaccgcagccgaggatgcttcgccacccccacctcccctcaggacatgatgggcggtgtcgtctagaacggcttgccccagtacatgaggatgtcctgcagcagcgggtcgccgccggcgtggccgacgacggggtcgagcatggagcccgcggggttcacggggtcggaggcgaaggtccgctcccactcgctgatcttgggctggctctgcacctcccggtcgcacgccagctgctccggggacagcacctgctccgagcagctggagtagtccgcgtgcagccgcggcatcgagtccgacggccggtcgtagtacgccgccagctccgggaacgccgggggcagcccgcccgccgccgccacgaacggcttctgctccggcggggagctcaccgccgccgtggcgaacacaggcttgtggtcgccgccggccgccggcgccgccgccttctccagcccgccgcccttcttgttgtagatgcggcacaggacccagtcatccaacctgaggctgttcttcttgcgcgccgagcggtcgacgtcggcgaggcggtactcgtgcatgatccagttggtcttctcgcccttgggcgccttgccggcgtagaagacgagcgccttcttgatggccagcggcttgggcgtgcccacgggcttgtcagcgccggtggccttccagtacccagccccggcggcgcggttgggcctggacccgttcgggtacttgcggtcccgcggggagaagaagtaccactccttctcgccgtacagcgccatccttgggagctgccatgggtcgaacttgtagaggtcgatctcggcgatgatggggacggcgatgggcaggccggcgcagcggcggcagaggtagtgcatcaccagctcctcgtccgtcgggtggaaccggaaccccggtggcagctgcagatccggaccggcgccgctcatcgtgttcctccctgctgatgctgctgtctgctggtgttctggctgtggctactgctaatggtag

SEQ ID NO: 159 - DNA, 1490 bp, Zea mays; identical to SEQ ID NO: 121

SEQ ID NO: 160 - DNA, 1065 bp, Zea mays
atggagctgccgccggggttccgcttccaccccaccgacgaggagctcatcacgcactacctcgccaggaaggccgccgacccgcgcttcgccccgcgcgccgtcggcgaggccgacctcaacaagtgcgagccgtgggacctgccatctcgggcgacgatgggcgacaaggagtggtacttcttctgcgtcaaggaccgcaagtacccgacggggctgaaggcgaaccgggccacggagtcgggctactggaaggcgacggggaaggacagggagatcttcaggggcaaggcactcgtcggcatgaagaagacgctcgtcttctacacggggagggccccgaggggaggcaagaccggctgggtcatgcacgagtaccgcctccaaggcaagcacgccgccgccgccaccagtagcagcctcgtcgtcccgtcgtcggtcagagctggcgcgtcgtcaaagcaggacgagtgggtgctgtgcagggtgttcaagaagagcatcgagccgccatccgtgcccggcagcaagaggtcatcgtcggttgcgtgcatggggacggagggcacgggagtgggagtggggccgtcgtccatgtccacagaggacgacttcgccgcgtgcgccgcgttgcctccgctgatggacgtgtccggcggcggcgccaacatgtcgctttcagcagcggcggcggcggcggcggcgtccatcgagctgacgccacctgcagcaccggcaccacacgtgacctgcttctccaacgcgccgctggagggccagttcctgaacccaccattcctcctcccttccgccgccgcagccgcggaccacatcgccctggcggcctccgcctcgccgttcctggcgagcatgatgatgcagcagcaggcgcagtacgccggcgacgcgggcgtggtgcacggcgacgggctcctgcagggggccggcgggtggtacggcaagctggccggcgagagggagcggctgagcggcggcggcgtccccgccgagatctcgtcgacgcggcactgcatggatcacgaggcctccttctggggcttctga

SEQ ID NO: 161 - DNA, 539 bp, Zea mays; identical to SEQ ID NO: 146

SEQ ID NO: 162 - DNA, 608 bp, Zea mays
atatataaacgccgtatatatgcttgtgctgacacttacaacagcaagacaatgagcacttatataaacgtgcatgcaataataagaaatcgatgtgctatatgtatatgcttggtgatcagcgcgcgcccctgcagcgttctatgggctcgcacccgcgggtgtatttattggcgttggcgacggggcggtacaggtccttgttctttccgtttggctcgtcggcgacaatcgcgtcgtagttcaacgtgctttttttttttttttttttttttttaacaaaagcatactctctctctccataccaattatacaacaccaccacaatacatctatctctcgtgcacatagcaaatgacaatgtcgtccggctcaaaatggcgtcagcgcacagcgtcacggcctaaaccataatctccagcgtccaccgatatagctcctgctccggcacgggcaggtcgacggacaagaggccggtgtcggcatcgtagctgaactccacttccgccgagtccaataggcacctcgccggctcccgcgagcagtaagcgccgaaccgaccgcacccgcgaaccctgagagccatggccttgccgccgtcatcgctg

SEQ ID NO: 163 - DNA, 1240 bp, Zea mays; identical to SEQ ID NO: 85
  misc_feature (1022)..(1022): n is a, c, g, or t

SEQ ID NO: 164 - DNA, 993 bp, Zea mays
ttcttccgaagagccaacacagctacaatatatactgtaaaatatatattgtaggagtaagtacactcgaagcttggcgatgacgaatatggcctgcactacctaccaccagtacggagactgcaactacaagcccttacaaaattactagtacttattagtataataactaatcaatgaaggaacagaraccctgcactgarccaatcatgtacagtatgtatatgtacagccacacacacatgccgcgcrcgakccaccacacccgatgcactgcaccatccgtctccgtctcccttccggsgggggggagrgggtctcattgccgcctctccatgtaatccagctatattttcatattatatcctccttgcaagtcaacaatggcggctcgcctgagtcaaagcccacaccgcgcggttgcattgcattgcgctgcccaagacagatcaaccaaccaaccaaccgcagccgaggatgggtgtttgcatgcatgcttcgccacccccacctcccctcgccctcaggacatgatgggcggcgtcgtctagaacggcttgccccagtacatgaggatgtcctgcagcagcgggtcgccgccggcgtggccgacgacggggtcgagcatggagcccgcggggttcacggggtcggaggcgaaggtccgctcccactcgctgatcttgggctggctctgcacctcccggtcgcacgccaactgctccggggacagcacctgctccgagcagctggagtagtccgcgtgcagccgcggcatcgagtccgacggccggtcgtagtacgccgccagctccgggaacgccgggggcagcccgcccgccgccgccacgaacggcttctgctccggcggggagctcaccgccgccgtggcgaacacaggcttgtggtcgccgccggccgccggcgccgcsgccyttctccagcccgccgcccttcttgttgtagatgcggcacaggacccagtcatccmam

SEQ ID NO: 165 - DNA, 575 bp, Zea mays
gaggattctgccatgtatggtagttcataaaccttagaatccataatagcaaattttattcatgatattacacaggtacggcaatctaagatatcatattaagggttgtagtcttatgaaattacacaagggagcatggtctagcatgttgggaggtggctccttattctgcaactttgctttgagcttcaggctcgcacatggagaaggagagatccttaggcgctagcaccctcttcaacaggcttgaattcctgcagctccttgaagttctcccatggcttctcccagaccttagcttcgtagagcttcttcacttcgccatccttcacttcaatagtgagatagtacatcgtgccagcaaccacttgtgtcttggccttcacaagcttctcgaaccccagaagagcattggccttcttgttgtgctcatcgacggcgaagcgggcgagttcctggaggtgaaggtcgttctcgttccccggcacgtccttgatgccgcccgccaacgtcccggtgttgtcggccatggaatcctcctgtgcgttgcgggtggacgatacggcgagggcaag

SEQ ID NO: 166 - DNA, 337 bp, Zea mays
cgcgcacaagttactagtattattacaaggctgatgacaactgcagagtcattttaggttcttgttgaaccagtcgagcatgtccgcaaaggcttcctcagcgctcttcacggcagctgcatcatcgaggctgtatctcacgctccacccatgcgccacgccagggaagaccttgacgaagtgaccaacaggaatagttcagggaaggagcaggggacagcgaaccggagtatgtgacttcagccacacaggtatgagcttctcagcattctcaggtacataaggatccccatgaaagaaatctggtaccacaacaaagtaccctgacgaagcaact

SEQ ID NO: 167 - DNA, 241 bp, Zea mays
tcagctccacggggtgcatacaaaaatacacttgcggtacaatctctggagctttaagtgggttgggaagtccatgctttgggcatttaaataaactctccacgaatggctttatttctgttcccttttcctcaacaactttgatgaatttatccccgttcaggggatcgactatccagttccagttagcaaatgctgtccagctgccctgcacaaaattttgcacttccgctgggctgga

SEQ ID NO: 168 - DNA, 432 bp, Zea mays
  misc_feature (8)..(8): n is a, c, g, or t
  misc_feature (244)..(244): n is a, c, g, or t
  misc_feature (335)..(335): n is a, c, g, or t
  misc_feature (365)..(365): n is a, c, g, or t
tttcagtngggccgagcaccatcgtcacagtcagtagccaagcatatttctttctccgactccgagtgatttgcgctgaacgatcagtttccagagcgagcggagctgagcgagcttgcgttgcttgagagaccctgccatggcttcccaccaggacaaggctagctaccaggccggcgagaccaaggcccgcaccgaggagaagaccgggcaggcggtgggggcgaccaaggacacggcgcanacgccaaggaccgggcggcggacgcggcggggcacgcggcgggcaagggccaggacgccaaggaggccaccaagcagaaggcgtccgacancggcggctactgggaaagaagaccgacgangccaagcacaaagccggcgagacgacggaagcgaccaagcagaaggccaacgaaacgacggagcgac

SEQ ID NO: 169 - DNA, 887 bp, Zea mays
  misc_feature (166)..(166): n is a, c, g, or t
  misc_feature (207)..(207): n is a, c, g, or t
gcccggctggatgtccttgtaggtgctcttgatgtcgtcgaagacgagcgacaccgggatcttgacggtctcctggccgtgcgcgtggatggtgccggcgtccgggatgaggcccgacaccagcttgcggccgtcgctgtcgatgaggtagtcgatgtccacgagncgggatcgggaccgggttcgggttcttgatgagcacgtccncgacgaggtcggcgcggtggaggctgatgtgcgggatgtggatgccgcacacgtcggccgtgggcttgccgaacccgacgacctcctcgatcttctcgccgatgtcgtggatgaagtccttcaccttgtcgatgaagccgccgccgccctgctccttgtcgccgccgtcctcgtgcttgtccttgcctccgcgctcggtcaccgtcaccgtggggtcgttctccgacgacgacgacatgcttgctctgctagactgttacgctgtgggcagtgccagcctcaacctcgacctcccccagtcccccccgccccggcctcctttcccgcaggcacgggcgcaccggcacgcggtttccactcgcttcgtccccgttcggatcgccctcagagtaacagtctagcagagcaagcatgtcgtcgtcggcggagaacgaccccacggtgacggtgaccgagcgcggaggcaaggacaagcacgaggacggcggcggcttcatcgacaaggtgaaggacttcatccacgacatcggcgagaagatcgaggaggtcgtcgggttcggcaagcccacggccgacgtgtgcggcatccacatcccgcacatcagcctccaccgcgccgacctcgtcgtggacgtgctcatcaagaacccgaacccggtcccgatcccgctcgtggacat

SEQ ID NO: 170 - DNA, 1371 bp, Zea mays
caaaaccaacaatccttcctttccatacatgcactacacccacttccgttcctgcagctatatatatatataccaccaccacattcccatcttacgaaaccatccacacgagaagaagaagaaacaagccataccatagcacacaccaaaggttactcagtcacatggcaacatccagcacgggctgtctcgtcttgctctgccttgcgtctcccctcctcctccttcccagtgcggtggtccttggccacccatggggtgtcggcggcggcggcttgtccccacagttctacgaccactcgtgtcccatggcggagaagattgtgcagtccgttgtggcgcaggctgtggccaaggagaccaggatggcggcgtccttggtcaggctgcatttccatgactgctttgtcaagggctgcgacgcttcggtgctgctggacaacagcagcagcatcgttagtgagaaagggtccaacccgaacaggaactccatcagggggttcgaggtggtagaccagatcaaggctgctctcgaggctgcctgcccgggcacagtctcctgcgccgacattctcgccctcgccgctcgtgattccaccgccctggttggtggcccatactgggacgtggcgcttgggcggagggactcgctgggcgcaagcatccagggctccaacaatgacatcccagcccccaacaacacgctccccaccatcatcaccaagttcaagcgccagggcctcaatgtcgctgatgtcgttgccctctcaggcggtcacaccataggcatgtctcggtgcaccagtttccggcagaggctgtacaaccagacaggcaacggcatggccgacagcacgctggacgtgtcctacgccgcgcggctgaggcagagctgcccccgctctggcgccgacagcaccctcttccccctggacgtggtcgccccagccaagttcgacaacttttactacaagaacctcctggccggcaggggccttttcagttccgacgaggttctgttgaccaagagcgccgagacggcgtccctcgtcaaggcgtatgccgccgacgccggtttttttttccgccactttgcgcagtccatggtcagtatgggcaacatctcgccgctcactgggtcacaaggtgagatcaggaagaactgcaggaggctcaacagcggccactgaggtcggtcgctttatgtgcgtggtgctgctggtggcgtgttttgtttgaataagaaagcatggctgtggttttatcagatgctctggttttttttttgtgtgtgtgtgtgtgttttatttaaacacattgtaaaatgtgtgtttattaattaataactcagtatatgagatgagttcattc

SEQ ID NO: 171 - DNA, 664 bp, Zea mays
  misc_feature (432)..(432): n is a, c, g, or t
ccccggggctgcagggggcccaacaagaagcctgaagccgctgccgctgccgcaccggctccgcccgtccacgcgccggcgccggcgccgcaggcggagaacgtgagcagcccggatggcaaggagaagaagggcttgctgggcaagatcatggacaagatacccggctaccacaagagctcagctgaggaagcagaccacaaggcggacgccgccggcgagcacaggaccagctcctaaggtcgcagtcgcagcgcgtgtcctggccgtggccgggccttgggcgatcagaaggtagctagcgttggcatgtgggttcggttctggtttgcttttaccaaaagtttgtttcaaggtggatcgcctggtcaaggtccgtgtgctttttaaggtggatcgcgtgactggcagtgagtgttgctgcttgtgtangacgtggtacgtacgggttttattttggttccaagtcaaaagtcacggtcggtctggatgttgtgtactgggtttgttgaattatgagcagctgcgccttgtaaaaaaaaaaaaaaaaattcttgcttgggggggcggcgccccaatcccggggaaaaaatattttttaaaccggccgcccccggggggggcctccaattttttttttcttttaagggggggtaaatttcaa

SEQ ID NO: 172 - DNA, 548 bp, Zea mays
aggcatctcttgactactggatggagttcatttgtcaataaaaagaaactggtttctggggatgcggtcttatttctccgaggtgatgatggtgaactaaggctgggcgtacggagggccattcagcttaaaaatgaggccctttttgacgatttcagttgcgacagtacaaaacggcatacattgttggctgtagctgattccttgaagcacaaaagtgtttttcacatttcttacaatccaagagctacggcttcagaatatattataccacaccataagttcctgaagagcctaaatcttccattctgtattggagcaaggatcaacttacagcgccataatgaagatgttagtgaaaggcgatctggaatggttgttcatgtcagtgaaatagatcccatgaaatggccaggctcgaagtggagaagcctgctggtaagatgggaggatggtgttgaatgtaacggccaagatagagtatctccatgggagattgagatagctggtggctctgtctctgttgctcattctctgtccgcatctag

SEQ ID NO: 173 - DNA, 286 bp, Zea mays
tccttaatccactatctgatacgtactatgtctatttgtcttgtcttatcggtaatctatagagcatatggagcagagggcagtgctgtggtgcatggttccatcagaacagtaggaagaagcgacctcgcagatcacgagatgggcctacgtcagtggcagctgtcatccagcggtgggctgagcgcaacaagcatttggagtatgaggaatctgaggaggcaaagcgaccaagaaaagcacctgcaaagggttcaaagaagggctgtatgaagggaaaaggggg

SEQ ID NO: 174 - DNA, 201 bp, Zea mays
ggccgaggcgacctccctcgggccgggcttccgctcctaccccaccgacgatgagctcgtctcctactacctagagcgctaggtcctcggccgcccgctcaaggtcgctgccatctccgctgtggacctctacaatttcccgctctgggacctgcccgccggctcccgtctccgctcccgcgactaccactggggcttttt

SEQ ID NO: 175 - DNA, 970 bp, Zea mays
cactctatcagactaattaaaggaagactagcaggtctgtaacggtctcaaactgttaaaagacgaaaaccaaccctgagactggaaacaccagttcatgtaaacttccccttagctacattgttctttcttttctctctctctctgtctctttttcagcggtcttgttgtcctagctcacggcatcacgccgccatggaacccagcggactgcaggagcacggacttgatctcctccggcagaagcccagggccttccttgcacagctcggccttgaagatgtccaaggaaaacccattgaagcaactgatgacagcttgctggacatcgaggccgaggccttcgatcgctctcatggcagagagcaggagaccgggcctgcgagcgcacagcatgtggatgttcactgcccggccttccctcatcctcacctcaaccctcggttgctgagaagtagggctaggcaatgcgcttgggcacagctcttccttcacgcgagacggtaaagtgggcagcgtcggggtcagagggtggaagcttgtgggcgtcggaggcagcgaggccgtggaaggggacgactccagatcattctgaagatcgttgatcttctgcagcagctccttcaggtactcgattgcgtcgccgagaatggaggccctgtccatcttgctgatcttgggcacgacggaccggagcatgtagagccggtcattaagcttcttccggcgacggcgctctgccatgaggttcttggccggcaaccccttcctcttacccttcccgtcgcccgtggcgccgccagtcaccgtgctgttggcgttggagtccttgccgtccttcttcccactgtcctcaacgcccctggcgtcctccgagtcgtagttgagcccggacgcgtcgatgctcccgccgtcgtcgtcgtcggcgtcgtccagcaccgtgtcaccgccgccgcccgaggaagccccc

SEQ ID NO: 176 - DNA, 289 bp, Zea mays
taaccttggcacttcttgccacgaatcctgtcgcgcttcagcatcataagctcttgcagcttcctcaggactattgaaagtaccaagccaaacacggacacccttctgaggatcgggacctcacttcagttgtcgtcgtcgtcatcgtcgtcctccttcttgaggcgggtggttccaccctctttgcttatgggcagcttcatgttgccgaagggagtgtcgacatcgatctttcccttgatggtgtatcccgtgccccttcccctgatcatgtcccagacagaggatc

SEQ ID NO: 177 - DNA, 696 bp, Zea mays
atgatgagcggcggcgcggtgaaggtgatcggcgccctggacagcccattcagccaccgcgcggaggcggcgctgcgcctcaagggagtcccctacgagcttgtcctggagaaggacctgcgcgacaaaagcgagctgctgctgcggcacaaccccgtccacaagaaggtgcccgtgctccttcacggcggccgccgcaccgtctgcgagtcgctcgtcatcgtcgagtacgtcgacgaggcattccgcggcccgccgctcctccccgccgacccctccgcccgcgccgccgcccgcttctgggcccgcttcatcgacgacaagtgctcgacgcccttctggctggcgatgtggacggagggcgaggcgcagagggggttcgtgaaggagatcaaggagaacctgaagctgctggaggggcaggtgaagggcaagcggttcttcggcggcggcgacgtgggctacctcgacgtcgccgccagcgtgttcgcgcactggcttccggtctgcgaggaggtcgcgggcgtcagcctggtcacggccgaggagtacccggacctgtgccggtgggcgagggagtacacctcccacgacgccgtcaagcggtgcctgcctggcagggaggagctgctcgcccgtttcagcgccaggaaggactcgtttgtggccgcggcgaggtcaatggcgcatggatag

SEQ ID NO: 178 - DNA, 2418 bp, Zea mays
ttcaaactaaataaaccactctctctgttctaaatcagtctcaaagccctcttacgagctgtgaaaaaaactactatggaccatgagctattaaaaatcctaaaaccgtttggtagaacctattaaaagccactaaaagttcttccatatttattttcacgctttaatccaaaagccgctaaaaagtaggtccaaaaatgctttcagttttgcatgcgagaaagtagacttttagaaaatgttgttttctaaatccagtcctttgatttgacttttgccttttaggggacaaaaattaaaactaaaccaaacacacccttagtccccagggctctcttaggcccggtgcactctaagccaaagaatctagctctagggtactccagtctttgaggccctttaagggacatcattctaggaccctctagacccttggggctcgactagtcttcggggcctcaagttcggggactaagggcatgtttggttccatgagactaaactttagtctcttttttttagtcctaaattaccaaaaataggactaaagagaggggaggaaatctgatttattcccttttatttcctatatttagtaatgtagggactaaaatagactaaaaggcagggactaaagtttagtcccatgaaaccaaacaaccccctagtctctactacacttggatgaaggagtggcagggcacgcccatgagctgcgccaaggtggttgacctgagcttcctctccttgacggccgggtcctccaggagcagcaccttgtccctgtcctggacgcccaccatgtgcaggtgctcgcggtcgtccctctccttgccccggtacagcagcctctgctccctgggccacagcccggtcaccagcgacagcgtcaccttcaggtcgcctgcattggattgtcgggtcaccatcaaacgcagcttagcgaacagcgcccacgatgtgctccccgcttgctagtttgatcgaggaaggagcaggaacaatgcagagcaggcagcatgcaacgcaagttacgctacgcaatgcagtgccgcggcgcgtacagaacgatcgacgacgacgacggacgtaccgaaggttgcgatggcgtcgatggagacgtcgtgccactgccacccggtggagacctttaccaggatgtactccacgtccacggccgccgccgcgtcgtcctcgggcgacggccgccgcctctgcaccagcatcccgccaggccgcacctcccactcgatcttctcgtgctccgccaccatggcgcagatgtccgctccggcgccgccgatggtggtgctgctcctggaccggctcctgaacagcctgctggggctcggaatcttcaccatccccgctgctctcggtctctctactaggctagcagctgctccgcgctctgctcctgtctgtatctatctcggccagtcaccggctctggtctctggatggttgctgccgctgcggggtgcctggactgggattttaaagagggggagaaacgggcaatgaggacaaaacggaggcgggacgtccaccgtgcggaaaccggaaatgattggcgattaacctcgtttgtttagctcgccaagacaatgacactcctaattagaaacggattagagcaattccaaactcctaatccgatacactgcttataatttctatagcctccgggtcatctacaaactactactatagattgcctctctaatataaacattgataatattacttaactgaatttaatacttctcttcttctcattgtgtcttagtgttgaaactaagccttatgcttactctttattcgtttaattgtctactacatcattttttatcctaattaatgttatagaaactgaaactggatgatatagagggctcttacgcgaggtggctgatggagacgacacctgttgctgctggggcggcgagaacgttggaaaagggcccaaaagctggtgtggacttttgcgatcgggcacacacacggtagtgcgggtgcggcggttggaagcggcagcacatgggggggggggaggcggttttgcctgcatgaatggcgggcggaatcaatcacccgcccacagcagttggctgcttacggctcactgttcggttgaacacactgctgttgctgtggccattaatctagcagcagcagttagagtacactactgtttcgtgccaaattgtcacggtaacttactgtttggtaggccagacataatggcctgctgtctgttttttatttagtttgtgtgtgtaggggtgcccacccagctctcagaagaacctagctagtagaatcaggggggaaagtgattattaagtgcaactgaaatcatatagggacttgtcacttgtttaaacaataaaactacccggcgacgaccatgatgat

SEQ ID NO: 179 - DNA, 1808 bp, Zea mays
aaatctgcttcaagctcgaatccgagagatccgacggccttgtttcttttgcgatgtctgtctatctatgacacacgtacgatgtgtaggagaagaccgggcaggcggtgggggcgaccaaggacacggcgcagcacgccaaggaccgggcggcggacgcggcggggcacgcggcgggcaagggccaggacgccaaggaggccaccaagcagaaggcgtccgacaccggcagctacctgggcaagaagaccgacgaggccaagcacaaggccggcgagacgacggaggccaccaagcagaaggccggcgagacgacggaggccgccaagcagaaggcagccgacgccatggaggccgccaagcagaaggccgccgaggccgggcagtacgccaaggacaccgctgtctccggcaaggacaagtccggcggcgtcatccagcaggtacgtatttgtggttgtggctggctggtcgaccagtcactcaaacctattccacgcacgtgcctacggattggacccaacagcgtgcaggtcgctcatgacagctttccgattctctgcttgcgtgcttggatctcggttccaggccactgagcaggtgaagagcgcggcggcgggcgccaaggacgcggtgatgagcacgctggggatgggcggggacgacaagcagggcgacgccaacaccaacaaggactcctctaccatcaccagggatcactagacgcgtgtatgcacacgcacttggtccgatcctgtcgtccgtgaccctgtttgcttgttcgcgagtccagtatgggtttgtgcacgttttcagtgtcatggtttccttctctacgaaatttggtgttgtaagtttgattcgcaggtacgttgctgtgttttttctgcgtcatcatgtctgtaaacgagtcgggcgggtttgagtgtcctttgttgtgataataaagttggtaaatcgtaattaatatatagcatgcgactgtcttgctatggcctagtatgtgtgttttgtagttttcatcagtgtgtgttgtgttagatataatcttaactttcgaagacaagtacgggacccaaaaaaaatgcttagtgaacaagaatgatgtgtatgcagtttacactctggaaagctactcacaaatgatactatgatgttgggaaaatcaatagcatctcaaacgtacctagtcagaggccgacatttgggccccgaaagaccaaaaagaaaatgggactcgaaatctgcgagctcttaaatctggcgttaatgcaacagaaccaggggaaaaaaaacggaggaacaaaaatattccaacgtgagataaaaaacaaactaaaaaattgtaggctatggtccatgcatcttgcaaaacagttcgctatattcattgcaagtttgctggatgcagtagttcagaaacatggttctgttgtaggctttgcatacgtccatttgccaatgggctcatgagcttacagttacaggaaatgtagccaagatttcttcttgtctgtgagatgcttgagtggcctaacctgtcataaaggctaaagcgccgatgcaatctgaaataatcggttgctaattcaatatgagtaagtaacttaaccctgatcaagttgtttcagtaattagctacaaaacccaatcactgtttataattctggtaagatctaaaaacaacttccaatctttcattcagtttttcagtaatgccacatacatgtgcacgtccattggttttggcattaaataattgttgaactttatttgtggtactgagtacggttgagtacggttggacg

SEQ ID NO: 180 - DNA, 268 bp, Zea mays
taactagcgctaagggtatgggtatcaggtcgacaacgatccccgcatcctctgcttcgctgcgtttcgtgaaaggtaacagcagcgccccagcagtcctcacttcagttgtcggcgtcgtcatcgtcgtcctccttcttgagccgggtggttccaccctctttgcttatgggcagcttcacgttgccgaagggagggtcgacatcgatctttcccttgatggggtatcccgggccccttcccctgatcatgtcccagacagcggatc

SEQ ID NO: 181 - DNA, 2022 bp, Zea mays
ccacgcgtccgccagcactgaacacttgattgattcagtgggtagctagctagctgaatcacaatggatcctaccaaggtgagctcagtatactctgcttcttcttcttccgtcatatcgatctttgatttgagattcgtagctcagtacctgttttgtgttgtttacttgtgttgattttgcttgcagttccgtccgtccagcagccacgacacgacggtgacgacgacgaacgcgggcgctcctgtgtggaacgacaacgaggcgctgactgtggggcctcgcggtcccatcctgctggaggactaccacctgatcgagaaggtggcgcacttcgcgcgcgagcgcatcccggagcgcgtggtgcacgcgcgcggcgcgtccgccaagggcttcttcgagtgcacccacgacgtgacgtcgctgacgtgcgccgacttcctgcgcgcgcccggcgtgcggacgcccgtgatcgtgcgcttctcgacggtgatccacgagcgggggtccccggagacgatccgcgacccgcgcgggttcgccgtgaagttctacacccgcgagggcaactgggacctgctgggcaacaacttccccgtcttcttcatccgcgacggcatcaagttccccgacgtgatccacgcgttcaagcccaacccgcggtcgcacgtgcaggagtactggcgggtgttcgacttcctgtcgcacctccccgagagcctgcacaccttcttcttcctcttcgacgacgtgggcgtgccgtccgactaccgccacatggaagggttcggcgtgaacacgtacacgttcgtgagcgcggcggggaaggcgcagtacgtcaagttccactggaagccgacgtgcggcgtgcggtgcatcctgacgcacgaggaggcggcgctggtcgggggacggaaccacagccacgccacgcaggacctgtacgactccatcgcggcggggagcttcccggagtggacgctgtacgtgcaggtgatggacccggacacggaggagcagtacgacttcgacccgctggacgacaccaagacgtggccggaggacctgctgccgctcaggcccgtggggaggctggtgctggacaggaacgtggacaacttcttcaacgagaacgagcagctggcgttcggcccggggctggtggtgccagggatctactactcggacgacaagatgctgcagtgccgggtgttcgcctacgccgacacgcagcgctacaggctgggtcccaactacctgatgctgcccgtcaacgcgccgcgctgcgcgcaccacaacaaccactacgacggcgccatgaacttcatgcaccgggacgaggaggtggactactacccgtccaggcacgcgccgctgcggcaggcggcgccgcccacgccactgccgcccaggccggtcgcggggaggagggagaaggcaaccatacgcaagcccaacgacttcaagcagccaggggagaggtaccgctcctgggacgccgaccgacaggaccgattcgtgaggcgattcgccgactcgctcggacacccaaaggtcagccaggagctcaggtccatctggatagacctcctcgccaagtgcgacgcgtcgctggggatgaagattgccacccggctcaacatgaaggcaaacatgtgatgcttctgctgaatagaataataatgaagacgcatgcatgtcgtcgccaggaacaagagaaataatacaagaccaccacgcatgggcatactccatatatatatgtatagcccgtgcccgtgtccgcctttgtaccaatacaagccaagactagtggatgtattattattattattattgcgctatcacatacatgtacccctgctacctgaagatggatgtgtatcgagttatcaaattaagacacctgcagcaaaaaactatatatgttgcataagaatactcgtctcgatatggacatgattcactcagctgctaatttgaagctatatgcttcggaatatctcgtgtatcctcgttgtc

SEQ ID NO: 182 - DNA, 1324 bp, Zea mays
  misc_feature (1314)..(1314): n is a, c, g, or t
  misc_feature (1318)..(1318): n is a, c, g, or t
gaattccattgtgttgggcaagacactgagctggtctgtttagttggaaagccatctgtactgtacgtttttcgccgatcatggaggatgagaggaacacccagcagcaccagggcggtgagcaggcccaggaccaggagaacgaggtgaaggacaggggactcctggacagccttctcggcaggaacaagcacgacgaccaggagaagaagaaccagcaggaggaggaggagctcgcgaccggcatggagaaggtcacggtggctgagcccgaccacaaggaggagggacacgaggccgccgagaagaaggacagccttctcgccaagctgcaccgcaccagctccagttccagctcgtcgagcgacgacgaggaagaggaggtgatcgatgagaacggcgaaattgtcaagaggaagaagaagggccttaaggagaaggtcaaggagaagctggcggcccacaaggcccacgatgagggcgaccaccaccagccgggcgtacctgccccggcgcccgcaccgcccgtggcggtggacacgcatgctcaccaccaggagggagagcacaagccgcacttcccggcgccggcgcctcccccgcacgtggagacgcaccaccccgtcgtcgtccacaagatcgaggacgacgacacgaagactcagaccccaccacaggcaccggaggaggagaagaaaggcctgctggacaagatcaaggagaagctacccggtggccacaagaagccggaagacgctgctgccgccgccgccgcgccggccgtccacgcgccaccgccgccggcgccccacgccgaggtcgacgtcagcagcccggatggcaagaagggcttgctgggcaagatcatggacaagatacccggctaccacaagagctcgggtgaagaagaccgcaaggacgccgccggcgagcacaagaccagctcctaaggtcgcagcgtgtgcgtgtccgtcgtacgttctggccggccgggccttgggcgcgcgatcagaagcgttgcgttggcgtgtgtgtgcttctggtttgctttaattttaccaagtttgtttcaaggtggatcgcgtggtcaaggtccgtgtgctttaaagacccaccggcactggcagtgagtgttgctgcttgtgtaggctttggtacgtatgggctttatttgcttctggatgttgtgtactacttgggtttgttgaattattatgagcagttgcgtattgtaattcagctgggctacctggacattgttatgtattaataaatgctttgctttcttctaaagatctttaagtgctaaaaaanaaanaaaaaa

SEQ ID NO: 183 - DNA, 668 bp, Zea mays
attgagttcgttgatgatgtacagtcagcaattaaccatatacatcgttatggaagtgcacatacagattgcattatccccacagatgataaagtagcagaaacttttttgcgtcaagttgatagtgctgctgtatttcataatgcgagtacacgattctctgatggggctcgttttggattgggtgccgaggttggcataagcacagggcgtatacatgctcgcgggcctgtgggtgttgaaggtctcttaacaacacgctggatcatgcgaggaagtgggcaagtggtgaatggtgacaagaatgttgcatacacccataagaaccttcccttacaatgaggctgtttttatgcttgatcaggattcgtgtctatccagtgatgtttgatagtttcatcaggcaggagcagagaatggtgaatcttttcgattgaggactgtgaatccatggatgttcagtcattgtttgtgtagacattgtggtgagcttggaggccaccccacctccccaataaagcagtgctgggagtaatagagcactgatgtactgagggtgcctaggttatatttgttttgcggtcgaacacaaacaatttttgttggtgacttgtttcttttgattctacatatttcaaggtttatgtgctgtcctaaccgggttcttt

SEQ ID NO: 184 - DNA, 611 bp, Zea mays
gcagcaaatcaagtcgcgcatgtgaactgcgggaactgccgcatgctgctcatgtaccagtacggggctcggtccgtgaagtgcgcggtctgcagttttgtgacatcggttggagtaagtactcaaagcatcctttttcagaaaaggatgcaattaacaaataatgttttttgttgtagaagactaccattgtttcgctgctattcttactgtaaaacaacttgtgtttctcatgagaaacagagaactaaccgccaagtttcactctactcagacctcacctggtgcagagcagaagcccagcagctgagctgatagtgtccctgaaagtgctgtgagaccacctatgaaaaggatgctttgagtgcacatgtatagagttcttccctgaagcgattctttcactttcttttcttttgttttcttttgttttcttttcttttttggttcctcctcaccatctccaccccacccgtccacttctgcgttccttcgatggatctcgcgagcccgcggaataaatgagagttttggatatatagctagggcttaacctcgtcgacttgtctgtaaaatcgaatgagacatatatataaacctatgttgttttc

SEQ ID NO: 185 - DNA, 1564 bp, Zea mays
ttattatgccgccagtcatcggtcttgaagcaaaagtttacatggaactcagcttcgcgctagtcaacacctcaagtccagccaagttcatcaaagaaccagcaacgacgcgtagcaggtactcaggtactagtagtagaacagaacgaccgccaatccgggcacacccagtttagttacagttacagtagttgcagagagttcagtttcagacgagcgagagccgagtcgaatcgctgataagccaaggatgagttgccagtgtcggggctccctactcaccgccccctctcgcgtgatagtggtggcgaccgccgggcggcaggctgtgctcatgcttcgtgaacaggccgccgctcgcggtcgcgggcacgcgttgcgcgtccgaggagccgccgctgccgggggactccggctgctgcttcgtgttcaggaaccgcccgcctgttccccgagctctcttcatcgcgtgcaggtgccgagactcgtggaggtacggcttgcggcttttcacgagcttgttttcagcctctagctttgcacggagctgtctcctccggagaatagcggggtactgcttcgcgttgacatagatgggctcttcagcggctggctcgatcggcaggggcactcgagaggacggaaccatgccaaccagctgagggtgcatctgctcgatttgtttaccaggcaaaatacgagactctgattaatttgtaattatcagaagaagaaaaaaaacaagccgctttacccaggaccaggagaatggcaatgatgcaggcgtgaaacgtaaaaaacgcctatgcttcaataacatagcaggagtaagatctgacgagacgaatgagttgaaggggtaaatcgatggcaatgctgctgggtgctgtctcagccgataggcatgctgtgctagcaaatgaagaacaccactaaacgcaataacgcacaggaaaaacaaaaagaaagcaccagtactgaccgcattgcctagcaaagtgtcttcaaagtggacaaagggcatcatctagcaccggcagcaagtagtgaaacaacaggctggacgcatggagatcacttacgatagcatgcgggccataagctgctgccaccgcgccaccgtagtatggatcggcatatgggtatgatatggcgaaggactgagtacggtcaggcttcggattatgtgcgtaagctgtttccggattgcccagggataacgctgacatcatcttgttttcgtcactcttcgagtacccatcaaggttgcctgaatggtcattattatgctcgttgaggctcccttcgctcattccagacgcttcttgatggctcgtctcactggttgactgggtagccggggagtcgtaatcaggcatctgatggccaaactgaatcatcaccgcgccattctctgtgagatgaggagggagcatgttccccttccggcagcccgccgcccttgctgctgcctctttcccaccttgcttgcttcgctcctctgcaaggtctcctccctctctctctctctctgactccctttctcttgcgctcgcacacagac

SEQ ID NO: 186 - DNA, 537 bp, Zea mays
cggaggatgatgaattcattgttttagcttgtgatggaatttgggattgcatgtcaagtcaagaagtagttgattttgtacataaacagctaaagaccgaggataagatatctagtgtgtgtgagaagttgctcaaccgctgtgtggcacctacatctggtggcgaaggatgtgataacatgacggttattgtggttcaattcaagaaaccagctttagctgttgctacttctagcgctgagcagtctgctaccactgcagaagggatgcggcccaaaatttgagttgcctttgtgaacagcgaggtcgatggcccagattaccccccgaagtaggcgttgagtggcacaccgtgctgtggagctctaaccggtggataatagacaaaaaaggatagtgaggtggtgtatataagaaaagggattctattcgacaatctcttatagggtttgttgcttccttctttctagtgttcagagtcgtcgcaacctgtaatacatggcatgttggtgcttaaatgggtttttttggaaaggc

SEQ ID NO: 187 - DNA, 1140 bp, Zea mays
  misc_feature (1125)..(1125): n is a, c, g, or t
caagtatgaaattatataaccatgtatatatatgtagtatgatttgctggttacacactggtaattaataacggtagagtgacagtgggcgggagagcacattgcatattgatgcttgcctcctccaatttcccccacatgcatgcatgttcggtcggcaacggcagccactaattaaataaagaagaaacaattaaacgcttaataagcggcaagcaatgaccgaggtcgatcattagtactggacgaaggagcggtagtcgacgtcggggatgtagttggccgggatgacgttcttggccaccagctgcctgccggactcgttggtgatgcgcatggagaaggggccacggagcgggcggttggggtcgatcctccagatggagccccaggactcgtgcatgggctcccagtggccggagttgctctgcatgatgtccgcctgcaccacgtcgccgtccttgttctcgtgctcgatgagcacggccaggtacatggggttggagccgtgctggacgcggaaggtgatggtcaggcccgggaagttgcacggcacccgcctgaactgcatgtcgatgatcccggcgtgccggagcttgtcgttcaggccccagctggccatggacccgaacgccgtgccgctaaggtcgaagtggtacttggccaccgggtagtagttcatgtccgtgatgatcaccgtctgcgccacgccggagcaggccgggtggttgctcttcaggcaccgtatctggtagcatgagccgcaacccttgccgtccttgaagatgggctcgttgccacaggacgtcatggacgagaacgggtactggttggtgcccttgaacccgcacgcaccaccgttgtcgacggggccggcgccggtgggggcgccgtaccaggtggccttggccggcagccagccactgctgtaggacaacaaggatctgtcctgcgaggcggtggtggcgttgcgcttgagctgttgctcggcgcgagcgccagaggtgacgacgaccacggagaggagcgcggccagtgccaaggccttgaaggacagcgcggccattggtgcactcttgctagcaccccggcaaatagtcgcggacgctgggtcgagcggtattnccggaccggaactgg

SEQ ID NO: 188 - DNA, 1101 bp, Zea mays
cgcgaacgtttcagccgatcgagcaccatcgtcacagtcagtagtagccaagcatatttctttctccgagtgatttgcgctgagcgatcagttcatccagagcgagcggagctgagctgagctgagcgagcttgcgttgcttgagagaccctgccatggcttcccaccaggacaaggctagctaccaggccggcgagaccaaggcccgcaccgaggagaagaccgggcaggcggtgggggcgaccaaggacacggcgcagcacgccaaggaccgggcggcggacgcggcggggcacgcggcgggcaagggccaggacgccaaggaggccaccaagcagaaggcgtccgacaccggcagctacctgggcaagaagaccgacgaggccaagcacaaggccggcgagacgacggaggccaccaagcacaaggccggcgagacgacggaggccgccaagcagaaggccggcgagacgacggaggccgccaagcagaaggccggcgagacgacggagacgaccaagcagaaggccggcgagacgacggaggccgccaggcagaaggcagccgacgccatggaggccgccaagcagaaggccgccgaggccgggcagtacgccaaggacaccgccgtctccggcaaggacaagtccggcggcgtcatccagcaggccactgagcaggtgaagagcgcggcggcggggcgcaaggacgcggtgatgagcacgctggggatgggcggggacaacaagcagggcgacgccaacaccaacaccaacaccaacaccaacaccaacaaggactcctctaccatcaccagggatcgctagacgcatgtatgcacacgcagcacttggtccgatcctgtcgtccgtgaccctgtttgcttgttcgcgagtccagtatgggtttgtgcatgttttcagtgtcatggtttccttttctacgaaatttggtgttgtaagtttgattcgcatgtacgttgctgtgttttttctgcgtcatcaagtgtctgtaaacgagtcgggcgggtttgagtgtcctttgttgtgataataaagttggtaaatcctaattaatatatagcatgcgactgtcttgcta

SEQ ID NO: 189 - DNA, 1790 bp, Zea mays
cgtgggtagctagctaggtgaatgacaatggatcctaccaagttccgtccgtccagcagccacgacacgacggtgacgacgacgaacgctggcgctcctgtgtggaacgacaacgaggcgctgactgtggggcctcgcggtcccatcctgctggaggactaccacctgatcgagaaggtggcgcacttcgaccgcgagcgcatcccggagagggtggtgcacgcgcgcggcgcgtccgccaagggcttcttcgagtcgacccacgacgtgacgtcgctgacgtgcgccgacttcctgcgcgcgcccggcgtgcggacgcccgtgatcgtgcgcttctcgcaggtgatcccagagccggggtccggacggacgatccgagacgcgcgcgggttcgccgtgaagttctacacccgcgagggcaactgggacctgctgggcaacaacttccccgtcttcttcatccgcgacggcatcaagttccccgacgtgatccacgcgttcaagcccaacccgcggtcgcacgtgcaggagtactggcgggtgttcgacttcctgtcgcacctccccgagagcctgcacaccttcttcttcctcttcgaccacgtgggcgtgccgtccgactaccgccacatggaagggttcggcgtgaacacgtacacgttcgtgagcgcggcggggaaggcgcagtacgtgaagttccactggaagccgacgtgcggcgagcggtccatcctgacggacgaggaggcgcgcgtcgggggacggaaccacagccacacgcaggacctgtacgactccatcgcggcggaggggagcttcccggagtggacgctgtacgtgcaggtgatggacccggcacagcaggagcagtacgacttcgacccgctggacgacaccaagacgtggccggaggacctgttgccgctccgccccgtggggaggctggtgctggacaggaacgtggacaacttcttgaacgagaacgagcagctggcgttcgggccggggctggtggtgccagggatctactactcggacgacaagatgctgcagtgccgggtgttcgcctacgccgacacgcagcgctacaggctgggtcccaactacctgatgctgcccgtcaacgcgccgcgctgcggcacccacaacaaccactacgacggcgccatgaacttgatgcaccgcgacgaggaggtggactactacccgtccaggcacgcgcgccgctgcggcagggcggcgcccacgccactgccgcccaggccggtcgcggggaggagggagaaggcaaccatacgcaagcccaacgacttcaagcagccaggggagaggtaccgctcctgggacgccgaccgacaggaccgattcgtgaaggcgattcgccgactcgctcggacacccaaacgtcagccagagctcaggtccatctggatagacctcctcgccaaggtcgacgcgtcgctggggatgaagattgccacccggctcaacatgaaggcaaacatgtgatgcttgtgctgaatagaataataatgaagacgcatgcatgtcgtcgccaggaacaagagaaataataacaagaccaccacgcatgggcatactccatatatatatgtatagcccgtgcccgtgtccgcctttgtaccaatacaagccaagactagtggatgtattattattattattattgcgctatcacatacatgtacccctgctacctgaagatggatattgtatccagttatcaaattaagacacctgcagcaaaaaaactatatatgttgcataag

SEQ ID NO: 190 - DNA, 1525 bp, Zea mays
tcctaccattagcagtagccacagccagaacaccagcagacagcagcatcagcagggaggaacacgatgagcggcgccggtccggatctgcagctgccaccggggttccggttccacccgacggacgaggagctggtgatgcactacctctgccgccgctgcgccggcctgcccatcgccgtccccatcatcgccgagatcgacctctacaagttcgacccatggcagctcccaaggatggcgctgtacggcgagaaggagtggtacttcttctccccgcgggaccgcaagtacccgaacgggtccaggcccaaccgcgccgccggggctgggtactggaaggccaccggcgctgacaagcccgtgggcacgcccaagccgctggccatcaagaaggcgctcgtcttctacgccggcaaggcgcccaagggcgagaagaccaactggatcatgcacgagtaccgcctcgccgacgtcgaccgctcggcgcgcaagaagaacagcctcaggttggatgactgggtcctgtgccgcatctacaacaagaagggcggcgggctggagaaggcgccggcggctggcggcgaccacaagcctatgttcgccacgccggcggtgagctccccgccggagcagaagccgttcgtggcggcggcgggcgggctgcccccggcgttcccggagctggcggcgtactacgaccggccgtcggactcgatgccgcggctgcacgcggactactccagctgctcggagcaggtgctgtccccggagcagctggcgtgcgaccgggaggtgcagagccagcccaagatcagcgagtgggagcggaccttcgcctccgaccccgtgaaccccgcgggctccatgctcgaccccgtcgtcggccacgccggcggcgacccgctgctgcaggacatcctcatgtactggggcaagccgttctagacgacgccgcccatcatgtcctgagggcgaggggaggtgggggtggcgaagcatgcatgcaaacacccatcctcggctgcggttggttggttgattgatctgtcttgggcagcgcaatgcaatgcaaccgcacggtgtgggctttgactcaggcgagccgccattgttgacttgcaaggaggatataatatgaaactatagctggattacatggagaggcggcaatgagaccgtctggccccgccggaagggagacggagacggagacggagacggatggcgcagtgcatcgggtgtggtggatcgtgcgcggcatgtgtgtgtgtggctgtacatatacatactgtacatgattggttcagtgcagggtttctgttccttcattgattagttattatactaataagtactagtaattttgtaagggcttgtagttgcagtctccgtactggtggtaggtagtgcaggccatattcgtcaccgccaagcttcgagtgtacttactcctacaatatatattttacagtatatattgtagctgttggctcttcggaaaaaaatggaagttattttgatt

SEQ ID NO: 191 - DNA, 661 bp, Zea mays
cacgtccctgcacatgatggaccggcgccccgagggggaggccaccgcgctgggcgcggtcagcatcgcggccatgctgtcgttcgtggcgtcgttcgcgtccgggctgggccccgtcgcctgggtctactgctccgagatctacccgctgcggctgcgcgcgcaggccgccgccatcggcacggggctgaaccggatcatgagcggcgccaccaccatgtccttcctctcgctctccaacaccatcaccatctccggcagcttctacctctacgcctgcatcgccgccgcagggtgggtgttcatgtacttcttcctgccggagacgatgggcaagagcctggaggacaccgtgaagctcttcggcaaggacgcggacgacgaggacgtcagcgacatccgtcgtcacgtgcccactaagaagccgtctactgagctgagtgctcagcactgatcgagtaatgtgctacgcaacacgtgtcctcccgagtgtggccgaagcttatgttccgtaaagcttcgatgatgtagtataatatttttttttgtgtgtcggaactgtggtgaatctatgtatatcccgcgcctcttttgtttattagatttgtacattttttgttgatctcgtggcatggtgcgtgtgcgtagaaaaaatattatt

SEQ ID NO: 192 - DNA, 332 bp, Zea mays
gccgccgaggaggaagtggacgggcctctcgcggccgaagaggcggtagatcttggccttcatggcttccgccgccgacgccgacgaggaccccttcttctcgtcgtccgagtcagacgacgacgacgagtccccgccgtggaacttctcggtgatcttgtccatcacagactccggcacagactcctccttgtggtcggccatgcctccctctctctctctctctatctctctcctccgccgctgctcggacgagaaatcacagtagcaagcttgtttgttggctcttgttcccctctcgttgctgcgcggtgtgctcacccaaagacgcc

SEQ ID NO: 193 - DNA, 1230 bp, Zea mays
gtccagtccagagtccaggctccaggactaccaccactccgtctcgtctcgtcctcacaccccactccaccaccacctctgccttgcaaagctttccaccgatccgccgcctcgtccgcgcgctcgcaggcagcagtgtggactacccgccccatactccatcccctactcgaagatgacatggattgcgtaagcgaaccgatcatcaggagcaacagtgtcagtactactgggaatgagaacctgagaagcagaagcatcaattctgaggctgacattcagcttgcgatcaagtctctgcgggcatcaagcatgtcgcatgagatggtagaggtctcgacggttcctgatcggagagatgaaggtgcatcctcaaggaagttcacaaggactgctagccagcaaaggagcgtgataatagaggatttagcaccctccccagagattaatggggaaaaggagaaagaaactgaagttgcagagaagagatggaaagtacttgtgtggaagactgctgtttatcttatcactctcggtatgctcattgcacttctaatgggactgaacatgtcctggactgcaatcactgcagctcttgttcttctggcactcgattttacggacgcacaagcttgtcttgagaaggtgtcatattcactgctgatctttttctgcgggatgtttatcactgttgatggcttcaacaaaacgggcataccgaacacactatgggagttagtggaaccatattcacgaatcgatagtgcgaaaggtgttgcacttcttgccgtggtgattcttatcctttcaaacgtggcctctaatgttcctacagtcctattgctcggtacaagagtggctgcatcagcggcttcgatttctcatggttcagagaggaaagcctggctcatccttgcatgggtcagcaccgtggctgggaacctcaccctcctaggctctgcgacgaatctgactgtctgcgagcaggccaggcgggcccagttcttcggctacaacctcaccttctggagccacctccgattcggggtcccgtcgaccatcggtttgctcatcgtcatcagttactgaaacagctgaaggcagaagagcgtagtgtaagagaagcagaatggataaaaatccttccaataagaagtacatgtaaattaggcttgccctataactcaagtgtgtatcggtacgttatgtctccgtctgtgctcttgctcg

SEQ ID NO: 194 - DNA, 918 bp, Zea mays
ggtctggcggctgagctggagctgatggatctagggtttgggttgcggtgatggtcctgcagtgcaggaggagctcatggcggaagctccggcgagccctggcggcggcggcgggagccacgagagcgggagccccaggggaggcggaggcggtggcagcgtcagggagcaggacaggttcctgcccatcgccaacatcagtcgcatcatgaagaaggccatcccggctaacgggaagatcgccaaggacgctaaggagaccgtgcaggagtgcgtctccgagttcatctccttcatcactagcgaagcgagtgacaagtgccagagggagaagcggaagaccatcaatggcgacgatctgctgtgggccatggccacgctggggtttgaagactacattgaacccctcaaggtgtacctacagaagtacagagagatggagggtgatagcaagttaactgcaaaatctagcgatggctcaattaaaaaggatgcccttggtcatgtgggagcaagtagctcagctgcacaagggatgggccaacagggagcatacaaccaaggaatgggttatatgcaaccccagtaccataacggggatatctcaaactaatgaaggtatggaccttttctgcgacagctgctcttacctgaggcgattttttttgtcttagttatttactaagacaccttgcggtgaccattaaagagtaaccaatcgccctcaataggtccgtttttatctgccagaactgatgaggtcgctcactaggagtaagtcgcttccctgggaacggttgtcggctagcaccgctcttgtatgtatattaagagtaacttaatgattggtcttttggctgcgatttgatttgattatatgtatttgtatcgggaggcataaatattgtgtaattgtgt

SEQ ID NO: 195 - DNA, 582 bp, Zea mays
tcaaatcgcagccaaaagaccaatcattaagttactcttaatatacatacaagagcggtgctagccgacaaccgttcccagggaagcgacttactcctagtgagcgacctcatcagttctcaggtaagagcagctgtcgcagaaaaggtccatacctccattatttttttatatccccgttatggtactggggttgcatataacccattccttggttgtatgctccctgttggcccatcccttgtgcagctgagctacttgctcccacatgaccaagggcatcctttttaattgagccatcgctagattttgcagttaacttgctatcaccctccatctctctgtacttctgcaggtacaccttgaggggttcaatgtagtcttcaaaccccagcgtggccatggcccacagcagatcgtcgccattgatggtcttccgcttctccctctggcacttgtcactcgcttcgctagtgatgaaggagatgaactcggagacgcactcctgcacggtctccttagcgtccttggcgatcttcccgttagccgggatgggcttcttcatgatgcgactgatgttgg

SEQ ID NO: 196 - DNA, 852 bp, Zea mays
acactttttccacaacgaagcaaatttgtgggcatgttccaaggaagctacagcccgagagatggcagttgcggcaagagactgttcgaggcgtctacagaagttgtcatcagaggaacgcaaacagattttgctagaagcaaatgaggacgcaattaggtctgaaaatgatgccgatgttgaggcagcacaagttgctggttatgaaaagtcgttggttgctaggatgaccctaaagccaggaaagataacaaatcttgcaagatccattcgtaaaactgctgacatggaggaccctatttcccatacattgaaaagaacagaggttgctaaagatctggtttttgagaaagcatattgcccattgggtgttcttctcattatttttgagtctcgtcctgatgcattggtccagattgcatctctagcgatccgaagtggtaatggtctccttttgaaaggagggaaagaagttatgagatcaaatgcaatattacacaaggtcataactggagttattcccgatactgttggcaaaaagctcataggccttgtgactagcaaagaggaaattgctgatctactagcgcttgatgatgtaattgatcttgtcattccgagaggtagtaagtctctagtttcccaaatcaaagcaacaactaagattccagttttaggtcatgctgatggtatctgccatgtatgctaagattgattatccagcagcatgtaatgcaatggaagcactacttgttcataaagatctttaacagagtgagggacttgatgatctattagtgggacttgaaaggaaggagtagttatttatggtggacctgttgcacatgacaa

SEQ ID NO: 197 - DNA, 355 bp, Zea mays
aaaacaaggggagcatcgtgcttagcaacgcaccactggaatttacaagctacagcagtagcctagacgtagcatccgaacatctctgtcatgtacacagtgacatacataggactagaataacatcaacaaagtagtcgcagaagtattttttttgaagccaacagacagatttacatatgccatgcaaaccacaagcccgacactcacgatacgggcattcacaatctgcggcttatcctaactagctctgcttcttggatttgaccgcacccctggggattttgctcaggaccttggcatccagcaccttgtactgcttgagggcctcggtgtgtgcccttccagcgaaatg

SEQ ID NO: 198 - DNA, 683 bp, Zea mays
ataactatagatccattcttattattacatgtaaaatgagcaaatacatttttttgaagtaaatgagcaaatacatttgacccggagactagctaggcagtgaacacagaagcaagaataatctttactttttattacgactgaatcttaacgatagtaatatagcttattatacgtgctctgacgcacattattttattttcctggcgtatcaaactgttgcggatctccacgacgtcgcccattccgtaacgagaaatatcacgcaaagccattgtcggcgcatgcacagtgcgctaacaagatgcatgctgggtctcagtctcagtacccaccggtgaacttggacttgatgagatccacgacactggcgtccacccgtagcgccttggagagcaccggcgtggggatcggcggagaggagccgaacagcgtgaggggcacgaagatgatgcccggtttctggctgttgaacgacaccaccatggtggcgtcctccttgccgacgttgaactggaagtgcacgaggccgcgcgggatgacgaacgtctccccggcgcggactaccttggagtagtacctgttcccggagtcgaggctgccgacgatgcccacgaggagctcgccgcgggtgacgagcccgacctcggtggcgcgcgggtggacgtggggcggggttggtg

SEQ ID NO: 199 - DNA, 422 bp, Zea mays
cggcacgagccgcaacctgcaattcgcgcagctgatgggcatggcggacgggctgtcgctgagcctccgcaacgccgggttccaggtcagcaagtacctgccgtacgggccggtggagcagatcattccctacctcatcaggcgcgccgaggagaacaggggcctcctctccgcctcttccttcgacaggcagctgctccggaaggagttggtgaggagggtcaaggccacggtggcgggacgtgagtgaagtgagcttgtcgagcatgtggaggtcggccgtgaagctgggactgcgacaagggcgagctgaaggccagaagctgtaaatacaccctccaacagtcttcagacattgatgtatcgaggctttagggaataataatcgaatgaatggaaccagtgtttgtggtactattttt

SEQ ID NO: 200 - DNA, 754 bp, Zea mays
  misc_feature (754)..(754): n is a, c, g, or t
actggacgcctgcagtccggtccggattcccttctagaacaggcgtccgcccagacaacactcaccgatagcaagtagcgccgccgacgtttcgagagcagagtatccaagctagccaagcgcgcacctcggtgacctagctagttcaggcgacgatatggcgtcaggtcaggaaagcaggaaggagctggaccgcaaggcccgcgagggcgagaccgtcgtccccggcgggaccggcggcaagagcgtcgaggcccaggagcacctcgccgaagggcgcagccgcggaggccagactcgcagggagcagctggggcagcaggggtacagcgagatggggaagaagggcggtctgagcaccacggacgagtccggcggcgagcgcgccgccagggagggcgtcagcatcgacgagtccaagttcaccaagtagtcctatcgcgtgcgtgcgtacgcagcgttcgtagctgtctgcgtagtgtaccttggccgtagctagtgctactctctactttggagtagctgaatgataataatgtagctagcagcatgcatgtaggcgatcatacatacgtacgtacacaggtacgtgtgtgtgatcatgtatgcttccagaagggtatcctagcttaatcagtcacgtcgtcaagtcgtcaatatggcaggttcgcgtcagggctttgtagtttgatagcctgtttcacgactcctcaataatcaagtagtgtaatgaaagtttggcggttccttgttn

SEQ ID NO: 201 - DNA, 645 bp, Zea mays
ctcttcactgcttcgtcaaatatatgattggatttagttttatagtttcgctgttacagtacataaaaacctatattacggggtggcactgtccatcagtgttgttgtaatgagctgtgatgactatcctttgctctggcaaagagcgtgcacaagcacatggcgtcctatatgctaggttctggcctcaggtggtcagggttcccatagccattgctcattctgcttttcttcagacattgcagtcgaaaccgcccttcccatcgtcgtcgatcacttcggcatcggagagttgtttccggcggctacctccatgcacctgcagcagcggagcggcgtcgtagtcggcgaccttctcgtcgaaggtcctctggtgcgcctgctcgcaccgctgcagtatctgaagcacacccttcatcgtcggccgcgaggacggctggcgaccggtgcatataatgccgagcttgaagacggcctcgacttggtcaccgtaaccggcgtccgcgatggacttgtctgcggcctcggcgatgcttttaccggactgcaggtgccgccacgcccagtcggccagggagccgtgctcgccgccgtcgttggccaacctaccggtggtcagctccaagagaacgaccccgaagctgt

SEQ ID NO: 202 - DNA, 376 bp, Zea mays
catgacgcggcaggagacgtggcgcacctaggaggaagagcagcggcttctcgcggggcgcgtccatgtaccggggagtcacaaggcaccaccagcacgggcggtggcaggcgcgcatcggccgcgtctccggcaacaaggacctctacctcggcaccttcagcacgcaggaggaggccgcggaggcgtacgacgtcgcggccatcaagttcaggggcctcaacgccgtcaccaacttcgacatcacgcgctacgacgtcgacaagatcatggccagcaacacgctgctgccgggcgacctcgcgcgccgcaggaaggacgacgccagcgacgacaacccggcgcccgccgccgcagccgccatcgccatcgccga

SEQ ID NO: 203 - DNA, 961 bp, Zea mays
gaaacaacggccatggcaacgacgacgacgcatatatatataatcagcagctaattaatgtacaggggagggagaggggtttcgcggctctcctctcgtcgttaaaagtgccactccggcaaaactcataaaaaaaagaggcagtgagtgacacggaggaggcagacagagcaactcaactccgcaggctccagtcctcagcgagttccgttgcagccgtcactcctcccactcgtgcgtgtcacacgggaagcagccctcctgggcgacgtccgtgatctggacgcccgtgtcgtagacctcgccggcgcgccgccgccgcggcagcacctcgcggtcggcccacacccacttgccgtcgtacccgcccgtcaccaccaccctgagctggagcgggcccggcggcgcctgcctcgtgctccacgccggcccgtcgtcgcgcgtcatgaacctccagttggacgaacccacctgcgcgacgtctacggcgacgatgtcggtctgcccgccctggtagaggaacctgatggcgaggtcgccgggggcatggctcctgtcctccaccctcaccgacaggttcctgtgcttgtactcgcacggcaccctcttgtactcgacgtcaacggcgcggcgtgctgcgaggcgtggggccatgccggggcgcgccatggccgcgaacgcggtgctgctgagcacgaggtcggtgcggttggtcctggcgcggtccgtgaccaccaccctggcgcccgccgcggcgcacagcttcttgtccttgcaccgcacctggaagcaggcgccgcagccgacgccggcgcggtacagcgcggggctggcggcggcgaggagccctgcgctcaaggaggcggcgtcggtgccgtacccacaggagccgcccgcggggagagcgcggcggacgcgtgcgtttattgaggaattccggaccgtaccgcaggcgtccagt

SEQ ID NO: 204 - DNA, 763 bp, Zea mays
gggcagcatatgcatgcgttgccatctatactaccatcatacccaataaagttggaatattttgatccctatcgtccttggcataatcatttttttattcggtgatgataacgatacacatgccgcttacatatataatgacatcatatatatgattaataattaattaattggtgatggtgatgagcctgccgtaggccttgcggtcgttgtccttgggcacggtgacggtgagcacgccgtcctggagcgcggcctgcgcgccgtcggtgttggcgttgggcgggaggcgcacggtgcgcacgaagcggtcggagctgcgctcgacgcggtgccagcggtcgcccttctcctcggcggcgcgctgccgctgcccgctgatccggagcagcctctcctcctccacctccaccttcacctcgtcgcggcgcagcccggggaggtccgccatgaacacgtgcgccgtcggcgtctccttccagtccatgctggccgtcgcgaacggcggcaggcctagcgccggcgccgcgaacgccgccagcgtgatggcgtccactagcggcccctgctccgcgatgtcgatgctcaccggctccactgccgccgcctccgtgccggcgccggcgccggtgccagtgcgcgcgccgccgcccttctgctgctgctgctgctgcggcggcggctgatgcttgcggcccagtatgctggtgagcatcgacatgtcagtagcgcgctgtgtagtgtcctcgcttcccaacacaat

SEQ ID NO: 205 - DNA, 226 bp, Zea mays
aagcagttcttcgccgagatatatacgaccgcccacctactatgaattgggggaaaggtcgtgtcaccttgcttggtgattctgtccatgctatgcagccaaatctgggccaaggtggctgcatggctattgaggatggttaccagctggctgtagagctagagaatgcctggcaagagagtgtcaaaactgaaactcctatagacatagtttcctccttgaggcg

SEQ ID NO: 206 - DNA, 1351 bp, Zea mays
ccatgaaaaaagtaagatttgactttcttattccttctacttcgtcacatgaagtcacatagaaggatcatgaacgcacaggattactgaggtggttacaatgcaaacacacacacatacgtagctgccttacaatgcaaacacacaaaaacacacacatacgtagctgccgcttattctttattgctttatttattctgtatacatgtacttacaggcagtcgccaaccggaagaggaaagaggcagctagccggaagaggaaagaggcagctgcttagtgcttagtgctgaccggggagtttctccttgattttgtccatgaagcccttcttctcgtgagtgccttcagtggtcgtcgtcccatacgtggtgtcggtggttccgccatagccaccgccgccaccggttgccgcggtggtgtgctgatgctggtcgtagtccttgtggccgcctgggatcttctccttgatcttctccaccacacccttcttctcgtgggggcctccggtcgtcggcccagccacgtaccctgtcccgccgtacgcaccggtggccgtcgcctggccctggccttccctgtggcctcctggcattttctccttgatcttctccttcaggcccttcttccggcgcccacccatgccgtcgtcttcagatgacgagctgctggagctggagctgctgccggagcggcgaaggatgccgccgcccgtcttgtgctcagctgcatgggggaacgcgccgccggttccagctacgcctgtggcgccgggacgcgtgccgtggccggcgggcatgccggtggccgcgtgccctccgccgcccaagacccccgtgtcgagcattccggtggcaccgtgcgcgccagtaccggtagtcgtccccatgcctgttgcgccatgcagaccaccaccggtgaggccggcggcgccgtcctggatcccggtcacgccgccgtgcgtgccgtgggctctcgtgcccgtggctgctccatacgcacctgggccaccggcgtcgtcgacgcccgttccggtagccccgtaacccggatggtccgagccgtcgtagcccccggcgtcatgcgtgccggtgcccgtggggccatacccggcctgctgctggccgccgtagctgccggtgcctgcgacgccgtacccgccggcggcttcacccagctgctggccctggacaccgtggcccccagggaccgggttgccgtactcgtccacttgctgccgcctcccctgctggtagtgcgccatacttcctgtcctcctcctgctcgctcgcttcttctgaagtctgaactttggctggctttactgagctcacttgtgtcactgcacgag

SEQ ID NO: 207 - DNA, 1290 bp, Zea mays
atggcttcagaaagctcttcgtcagagtttgccaagatcgttcagtctaagcagacgaggcaagctcggctgtgcggagcggactctgagctactgagctccctggcgggcagcgacgcggaggtcatggtcaccatccccaacgagcagctggagcacgtggccgagttccaggaggaggccgacctctgggtcgccgccaacgtcgcgcggttcctcccgtcgaccaggatcacgcacgtcgtggcgggcgacgacgtgccggcgaactcccccggcagcgcccacttcctggtcccggcgatgctcaacctccggtcggcgctcgtcgccgcgggcctcggcggccgcgtcaaggtgtccagcgcgatgtccggcgaggcgctgtccgcgccggcgtggtccggcgtcgtgggccacgtcctgcggttcctcgagtcggccggctcgccgctgctcctcaagtcgtcgtcgcgcccgtcggaagaagccagcgacgccagggtcggccgcgcgtacgccgcgatgcgcgcgctgggcgtctcgggcgtccccgtgatcgcgacggacctcgcggccggcggcgacgccgtgccgtactactactcctactacggctacggctacccgggcggtcacggtcggcggcggtcgctggcgacgacggggacgttctgcgtggcgctgcaggacgcggaccccgcggcgctgcaggccgggctcaactgggcgtgcgggccgggccacgccgactgctcggccatccagcctggcggcgcctgctaccagcagaacaacctgccggcgatcgcgtcgtacgcatacaacgactactaccaggagatggccagcaccggcgccacctgctccttcaacggcaccgccaccaccaccaccaatgacccaagttcagggtcttgcgttttcgcgggaagctccacagcgggaggctcctccaactcgagcgtgccggtgggcgcaagcccgccgaccagcctctcccctccgacgggcttcgcacctccagtcggctccagccccccgtcgtcgtcgtcggagtttagccccccggcggtcggcaccgcccctttgtccggcttcaccccgccggacggaggcggcttcggcaccccgccgggttccttcaatggcaccgggacgttcgggccgagcggcacgctcagcccttacaacggcggggcccctgggctgtcgcgcgccggcttgagcttgacggctctgtccgccgctgcggtcgccgtgcttctcgcgtccattgatgcgatgtga

SEQ ID NO: 208 - DNA, 875 bp, Zea mays
ggcttcaaaggtgcggaaagagttgtaggctgaggtggataaactatctgaggccagacctcaagagaggggcattcgcccaagacgaagaagacctcatcatcgagctgcacgctgtcctcgggaacaggtggtctcaaattgcagcgcagctgccagggaggactgataatgagatcaagaatctatggaactcgtgcatcaagaagaagctgaggcagaaaggcattgatcccaacacccacaagccacttactgaggctgatcgcggcggtgcagctcccaccatcagcaccgagagaacctcagggtccagcgacgtcaacccatcaagcactggtcctctggggaacttgagccccctcctcagcgagacggctcaatcatcaatgctgatgcccgtgtacgacaagaatcgtgctgaaacaccaaacttggcacgccctaagctgccaccaaaggagctgttcctggagcagcttactgctggacatgagagtccatcaacctgccactcatcaggccaaactctctatttccctttccaacagcctttaggctacaacagtgagagtggcagcagcgatggggcgaatatgaattcactctggttcaaccagagtgacttcaactgcagcacaatttctacagtgatgccgccagtttcaccatcggccctctctacatcaatggggctgaatcttccacctgataatcctcgacatggaggaactggcattggaacagtagcagtactgggagcagagggagcaacagtatgggatttgaaccacagagcacgagcacaattctggagaacagtgtcttcccatggacagacattggacaagaaaaagatacaagggctcacctag

SEQ ID NO: 209 - DNA, 1843 bp, Zea mays
ctcgatcttgctcgccactcgcctccctggctctctccctacttcccatgctgatctcggcgtgcttcgcttcctcctgccccagagcccggcctcgttggaaactcgactgatttcccttggcggttgctggatcctttggcgttccccatccggccaagaatcctgcaagagcctgcttggagttggagccggccaaacctgctgccgtcgacgtctcgggcgaggcagccttgagcatcagtctccttgacgaggcaagcaggccatgatgagcttcaagggacacgaggggttcggtcaggtgtccggagccgggatgagccaggcctcccatggcgccgcgcctgccggagccccgctgccgtggtgggctggggcccagctgctgtccggcgagccggcgcccctgtccccggaggaggcgccccgggacacccagttccaggtcgtgccgggggcctctcagggcacgccggatccagcgccgcccaagggagggacacctaaggtcctcaagttctctgtgttccaagggaatttggagtcgggtggtaaaggagagaaaaccccaaagaactctaccgctgtcgttctgcagtcgccattcgcggaatacaatggtcgtttcgagatcggtctcggtcaatctatgctggtcccttccagttattcttgtgctgaccagtgctatggcatgcttacgacttatggaatgagatccatgtctggtgggagaatgctgttgccactaattgcgccagccgatgcacccgtttatgtgaacccgaaacagtacgaaggcatcctccgtcgtcgccgtgctcgcgctaaggcggagagcgagaacaggctcaccaaaggcagaaagccttatctccatgagtcgcgccacctccacgcgatgcgccgggtgagaggctccggcgggcgcttcctcaacacgaataaaggagggcacggcacggacgttgctgcaaacgggggcagcaagatggcggcggcggcggcaccatcccgtctcgccatgccccctagcgctgagcctccatggctgtcagggctcagcgacggcagcaacccgtgctgccactcccggagtagtgtctccagcttgtccgggtcctacgtggcgagcatctacggtggcttggagcagcacctccgggcgccgcccttcttcaccccgctgccgcccgtcatggacggcgaccacggcggccccacggccgccaccatctcctccttcaagtgggcggccagcgacggctgctgcgagctcctcagggcgtgaaccgaggagggaggggatggctactcagacgaacggccttctccccgatggctggttgtctgtaggcaaatcattcttggctgttctgcattggggtgcgacctacacatcatccgcctaccgtacctaccccacccgtgtccctgaaattccagggtgcttgggttacttacaggggtcttgtgtggtgatgtggctcccccatatgcatttgctgtaacatagcgtacccaaaccactgttgcttggtacttctcgctatcactgcctcatcagtatggattctgcatttctgcgttgtcacagtgtatgaataattgaggcgtcagacttcagggttgctccagttcttggagataggtctgggtttgtttgaagcttgcctggaggtctgaaactttgtgtttggtgaagatgctacgttattgcagtttgaatctgtaagtttgggatcagcattcagttgttgcatcgtctgtgctctggtgccgaggtgttcgttctgaatatttgattcaattcaaaatcttcagctaagttactactggg

SEQ ID NO: 210 - DNA, 1455 bp, Zea mays
aacagtcacaaacaaactcatgtaaattaacctgagtcacaaaacaaaaactcactaaactgaaacgagccacaagcagatattcatcattcatacagcacagatgacttccgtagaccgcacagaatgcaacaaagaaatatataaaaccaaaaccaaacattaaacccataactgactagtcactagattagtcaatgaaacaggtacagaaagttgtgacacaagtgattagcaaaagaaaagcaacataatagctagcagcattcggctttttctttgctaatgcactaaactaacaacctcacgaaactaatagatccccttcataaacacctgttccaaacaacttaacattaaagatagcaaaccagtgagctaattggggacctaacaatcgatttgctacctcacaacagcggaaatactatttactcgtcgtcgtcgttatcctcgtcactaccgccatcctcatcatcgacctcggtttttttttgccaagggggattggtaagttaattcgctacaaatcaatttggattttggtacaaggtacaaggtacaagtacactacagtacagatgagttggtggagcttattgctgctatagcttgctagtagctccagagcgcgacgtcagctccggagtcgcagcagtcaccatgatcccaggcggcgggcgggggcgggggcggcggctccacgagcagcccttccgcgaggctggcatagtacaagtccaagtccatgtccccgaaccagtcgggctcgaacacggcgccgtccaacgccaccgtctcactggcctccacaggcacgcgctcaatcgccggcgccggcttcgtcgccgaggaggaggaggagggaggagacgtgcccgaggtcgcttcgtcggcggctgccgccccgaagcggcgtctctggaactccgcgacggcctcgagcgcggcccggcgggcgccgtccaggccgcccgagagcgcgggcgggggcggcacggcgagcagccacgcggagtcggggaagttgaggcaggccgcgccgcggcccagggcgagcatcgcggcgtcgtgcgcgcgcgccgccgcctcggcgccgaggtaggtgccgagccacagccgcgcgccgcgccgcccggggacgcgcacctcgcacacccaccgccccgcggcgccccgccgccgcacgccgcggaacaccgggtgccgcgtctcccggaacttggtgcgccccgcggggcgcttcttgggaccagagcagcagagcggcttgtcctgctcggacgaggacgacgccgaggtggaggacgaggaggccgcgtgctggagctggagctggtgccggcccatgtccatggctgccgctgatcgctgctggtggtggctgcttgcttgagcttgctggtgggagtggaggtgggttcctttgtctcgggattgagctgagtctgagtg

SEQ ID NO: 211 - DNA, 871 bp, Zea mays
ctttccccaatcccatctcctgccccccctctcccaaccctatccacgccgccgccagccctgctcgggtggtgcgcatacatgaaccatccgtcctcgtcgtcgtcctccgcccagccgccgccagccccggcggtggcggccgaggccacctccctcgcgccgggcttccgcttccaccccaccgatgaggagctcgtctcctactacctcaagcgcaaggtcctcggccgcccgctcagggttgatgccatcgccgatgtggacctttacaagctcgagccctgggacctgcccgcccgctcccgcctccgctcccgcgactcccagtggtatttcttcagccgcctcgaccgcaagcacgccaaccgcgcccgcaccaaccgcgccacgtcgggagggtactggaagaccaccgggaaggacagggaggtgcgccatgggcccagacttgtcgggatgaagaagacgctcgtcttccacgcgggacgcgcccccaagggcgaacgcaccaactgggtcatgcacgaataccgcctcgagggcgatgacgccgcagggataccgcaggactcatttgtggtgtgccggatcttccagaaagctggaccaggtcctcagaatggcgcacagtatggagcgcctttcgttgaggaggaatgggaggaggatgacacagatgatggtttgcttccagtggagggtgttgctgctgctgaccctggaggttcccctttgcttctgtggagatccctggtgctttggagagaggctatcttcaaatgagtgatctcattcagggtttgggtgatcgaaatggaaatggtacaaatagcaagggccaaatgtaaatgcaaggagctggtcctta

SEQ ID NO: 212 - DNA, 676 bp, Zea mays
ttagctagtactagtagggaggaattaaggccaaacgacgacgacgcacggcggcatggcggccggccaccacgggcagccgccggacggggaggacgggcggcgggcggtcgtcggcggggagcaggaccggctgctgcccatcgccaacgtcggccgcatcatgaagcagatcctgccgcccaacgccaagatctccaaggaggccaaggagacgatgcaggagtgcgtgtccgagttcatcggcttcgtcaccggcgaggcctccgacaagtgccacaaggagaagcgcaagaccgtcaacggcgacgacctctgctgggccttcggcgccctgggcttcgacgactacgtcgaccccatgcgcggctacctccacaagtaccgggaggtcgagggggaccgcgccgccgcagccgcgtcctcctcccgcggcggcggagaccaccaccccgcgtccgcgtccacgtccacctcgcccgccgccgccgccgcacccggtcatttcatgttcggcgccgcagccatcgaccgccccgacaacaacacctcatccgccaggcccttttgatccaacttctacttcgccagctgctctttaatttgcttgttattcgtcagatcaacaacaaaagctacgcgcttatcttattaatttttactactgctcattttt

SEQ ID NO: 213 - DNA, 2108 bp, Zea mays
catggtgcatggtcatgccttttactcctttctcgtctgccagcgcgcgggggaaggagggacgaaagtgatgcagccgccgccgcagctgccggcggctttgccggtagggttccgcttcccccctacggacgaggagctggtgctacactacctcaagcctaagatcgcgggtcgcgcgcacgcggatttgctcctcatccccgatgtccacctctcggcgtgcgacccttgggagctgcccgctaaggccctcatcaggtccgacgatcccgaggggttcttcttcgcgcccctagaccgcaagtaccctggaggccaccgctccaaccgctccaccgcacccgggtactggaaggccacgggcaaggaccgcctcatccgctcgcgcccagcaggcaccctcatcggcgtcaagaagacgctcgtcttccacagaggcagggcaccccgaggacaccgcaccgcctggatcatgcacgagtaccgtacggccgagccccagctcccacaaggccaaaacggtaccttcgtgctctaccgcctattcaacaagaacgaggaggaatccgaagcctcagacgctgccgattcaccgtccacgtcgtctccgcccatcgcgccggaggtgaaaactgagaatttgagccaaccgacttctgccaaaatgtctccccatattgcaactgtcagtagcaatgagccaacgtctaatcagggagacgttaatcttctggatgtgttaacccagcttccagacctacatcctgagcaagcattcgatggattccctaccatcacctctcctatgcgcccttacactgatcatccattttttggcaatgctggcgaccaagatctttcagcgtatatagacagtatcatctctcatcaggatctggaaggcttgttggccagcccttctttggctgacatggttgagcaggctactgtaaatgttgagccccaccctattaatgtacccgttctagacaacagctcaaacagcaacagattggctgaaaacagccgtggaaaagttggttctgaaacgttgctcctaatcaagggtacagatggcacaggtgctgctgcttgctcttcttctgcaaccaaaatactccaagacaatactgatgatcacacaggagctcaaagtaacttggcttccagtgcatcagctcaagtgtctcacttttacaaccaatatgaactccaatcggcattcgtccctgaaatggaaccaccaaatagtggaaccttgtgctctgcagcctccccgactccccatccccagcacttgttcaacggtgtggtagcttcagatgtcttcaatggaatccaaggatggccagcggaacctttgacggatccacaccaagggaatgcaccaagaaggatccgccttgcgcactctattcagagggcatcagtcactgagcctgtactaacttctgatgtggaggatgaagatgaaccgggaatatgttatagcgcagacagttcatccgccagcaataccgaggattatgccaatgtgttctcccaaactatggctggagaaacaatgcgtattcaacgtggaggggtgatatctactcaagtagtttcgtcaacagaaaagctacaagatttcacatttgatgaaggtacactgctacatggtgagctgcatcatggaggcaatctcaggcagcggcgcacggaggagacgaggcaggatgttcgtgatggcatgcagcacagcgtccatgtgactagagtggcagtgccatccttgagaaggaaaggagaggctgcacagattggttcagtggtgcggttgctccttttggttctcctcctcgtcgtcatctttgtatttgtaggattatggaaatgtagctcgttcagattgttgcattagcagctactatttgtgattcaggggtatcagtgcattagtagctagtttgcctggttgtctgatctcgtgaaggagcaggggaaagtttatgcaggattcacaatgctcctcttgtctggcttgacatagaaatctaaaagttgtgacttgtgaggcaacctgttgccttgttcatataataatagaatgaaacttgtgttgc

SEQ ID NO: 214 - DNA, 1068 bp, Zea mays
atggacaaggtgaagaggggtggagaagcgctcatggccgccggagccggagccggagatgaagagaaagatgacgcggtgctccctgggttccggttccacccgaccgacgaggagctcgtcacgttctacctccgccggaaggtggccaggaagccgctcagcatggagatcatcaaggagatggacatctacaagcatgatccatgggacctccctaaggcgagcacggctgctggtggcgaaaaggagtggtacttcttctgcctgagaggaaggaagtaccggaacagcatcaggcccaacagggtcaccggctccggcttctggaaggccaccggcatcgaccggcatatctaccctgccaccgcgaaccccgtcgagtccgtgtccgtcgggctcaagaagtccctcgtgtactaccgcggcagcgccggcaagggcaccaagaccgactggatgatgcacgagttccgcctcccgccggccgccgcctcgccctcgccaacgccgacgagcatgcaagaagctgaggtgtggaccatctgcaggatcttcaagagyaacatcgcctacaagaggcagccgcagctgccggcgtggaggcagcagcagcagtccagctccaacacggggagcttcgagtccgacggcggcggcggcggggacgagtacatgaaccgctgcctgccggtgccggccacggccacggccaccgctcatcagatcggcggcatgctgaacggaggaggcgtcgtcagtgccactggcagcagcagcagcagtttcttcagggacagggagagcgtgcacggcggccagcaattccacttccacgagcagtggctgagccgcttccccgccgcgccagcagtcgagcagaagccgcagctcctggacccgtcggcgatggccatcgcgttccatcagaacgacgaccagagcgtcgccaccgctgccgctgccgctgcgagcgagtgctgcaaggacgggtactactgggacgagatcgcgaggttcatggaggtcaacgatccaacggtgcttcacgactgtagatacgcttga

SEQ ID NO: 215 - DNA, 898 bp, Zea mays
ctacactcctccgcctgccgtcctgtcctgcgcccttactcctcggacgccccccacgccaccaatccccaaccccccattccgcactcccctctccctgccccgccgcgcttccttcgctgctaaagcggctgcgatggcgctctgggcgctgccggtcggcttccgcttccaccccaccgacgaggagctcgtcagccactacctcaagggcaagatcaccggccagatcaactccgaggccgaggtcatccccgagatcgacatctgcaagtgcgagccgtgggacctcccaggtaagtctctgatccggtccgacgatcctgagtggttcttcttggcgcccaaggaccgcaagtaccccaacggtagcaggtcgaacagggccaccgtggccgggtactggaaggctactggcccggacaggaacatcaagtccaagggcgacaagagcaaacagtttaccatcggcaagaagaagacccttgtcttccaccgtggacgcgccccgaagggcgagcgcacagggtggattatgcacgagtaccgcaccaccgagcctcagttcgagtctggcaagcagggtggttatgttctttatcgcctcttctggaaaccagaggagaaaactgagcgctccagcccaaaggaaatggatagaagtggcaactcgcctactactattcgttcttcacgtgacaaccaagaggcgaatgaggaagctaatacaccattaaataaaaaatctctagaatctgctctgcatgatccgattgagctgcccaattctgctgaaacccctgctggggcaaggaaaatgtgcctggcggacagaaatgataatttggtggctactgcaccggttgtttcccatatacctttccaaggacatgctgct

SEQ ID NO: 216 - DNA, 836 bp, Zea mays
cccacctctccctcctcctttcttctgtcgtctctctctccgcacgcgcaatggcgaggcctcgcaagaacagcgccgccgccgccaacaacaacaacagcaacaccaccaacgccggcaacgccgccgtcgacctcgcggcgcgcgtcaagccgaagcgcacgcggaagagcgtgccccgggagtccccctcgcagcgcagctccgtctaccgcggcgtcacacggcaccggtggacggggaggttcgaggctcacctgtgggacaagaacagctggaacgagtcccagaacaagaagggcaagcaagtttacctcggcgcgtacgacgacgaggacgcagcggcgcgcgcgtatgacttggcggcattgaagtactggggccccgacaccatcctcaacttcccggcgtctgcatatgaagcagagttgaaagaaatggaggggcagtccagggaagagtatattgggtccttaaggaggaaaagcagtgggttctccagaggtgtttccaaataccgaggtgtcgcaaggcatcaccacaacgggagatgggaggcgaggattggtcgcgtcttcggaaacaagtatctctacctcgggacttacgggacgcaggaggaggcggcgatggcgtacgacatggcggcgatcgagtaccggggcctgaacgccgtcactaacttcgacctcagccgctacatcaagtggctccgcccgggcgccggcgttgcgcagaacccgcacccgatgctggacggcctggcgcagcagctgctgctgtcgccggagggcattatcgacggcgcctgcgtccatcagcagcagcacgaccac

SEQ ID NO: 217 - DNA, 1548 bp, Zea mays
agatagatcatatcagtaagtaataataactgtatatatatgttacatagctgtaattaaggaggaattttacatagctagctagctaccagctgctgagactggtgcacttactcctactatactgtgcatcatgttgtatacagtatacctgaatcatctaaggcagtctgtaatgtaagtcgcaacgaactacacatgcatgacaatggaagtgtgtatgaacacatctgaattattagcatatacgtatactctgtgtgtgtatgcaactaataaatatattgtataatgccgatgaatgaataatgttctccgctggatcaaagaaagatggatcgatcgacgatggccggaggtcactgcaacaaggatcccgagggcccatggagttgcgacgtcgcggacagcaggctgtccagaaagttccagtcgatggcggctgcagcttgctctcctcctcctcctccctgctggatcatcatcatcatcatctcatgttcatcgtagctgcttctctgcgcgtagccgccggcgtcggaacagcaggccatggcagtggggctctccagcggcgggatactcaacagctgcttcttggactccaagtcgtcgtcggagtacagctgcgggaagctgctgcctgcaagccctggtggctgctgtagcagtgctgctgctgctgctgatgagcccgccaggaaatggcggtcgccgtctacgtgcagccgtgccgtcgttgagaggttgtggtcgtagtagccggcgtagctggtggggaagaagggccgctggtaggggataggcttctggaaagcgcggcacaccacccagccttcctcctgcgccagtgcgtgctcgttggattggagtcggtactcgtgcatgatccagtcgctcttcctgccgttgggtgccctgcccttgtagaacaccagcgtcttcctcatgccgatgaccctgctacacctggtggtcctggtggacgacgacagcaccggtttgtccctgccggtggccttccagaagccggccgccgtggcgcggttcgtcctcgtcccgctggggtacttgcggtccttgtagctgaagaagtaccactcctgtgtctgctcgtcgtgcccaccgccggcgtgctgcggcttgcaccgctcttgcagatcccatggctctatcctgtagagatccacctcctggatgatgtcgaggtcgatcctctgggaggccaccttcctggcaaggtagtagcccaccagttcttcctccgtagggtggaacctgaagcctgggggaacacaagactcctccgccgcctgatccatgtttagttattaattgctgctgctgcttctcgatcggcgcacgtacctccttgtagtgagtcatcaggatcagggtcagggatcggaggaagctatagcaagaaagaagacactgcaatctgcacatgcatgcaaagaaaggatagagagtacagatcgataccctcgccggtagggaggcaggcaaataaagctgctagcagaagagaagagcagctgctgcttt

SEQ ID NO: 218 - DNA, 183 bp, Zea mays
gcatacataattgagctggaagctgaggtggcaaaactcaaggacctgaatgacgagttgcagaaaaagcaggttgaaatgctgaagaagcaaaaggatgaggtcctggagcgaatcaacaaccaacatggaccgaaggcaaagaaactttgtcttcaccgcaccctgactggcccatggtag

SEQ ID NO: 219 - DNA, 330 bp, Zea mays
aagtacaggcgagaaacgcgattcacatcccaatgtcatccgaaagagatcatcaatagaatagaagaagctgctaagccacttgggttctatatccaaaagaaaaactacaagatgctaatggagaactcaaaagcaggaaggaaaggaaacctaaatgttgagactgaggttttccaagtggctccatcgctccatgtggttgagctgaagaaggcaaagggagatactctggaattccaaaacttctacaaaactctgtccacggagctgaaggacgtcgtttgggcgcgtgatgatgaggtccaggacagaagctcctcgccatga

SEQ ID NO: 220 - DNA, 528 bp, Zea mays
atgtgcgaggactgcgtcgcggcggcggtgcccgagaaggcgttgctgtcgtcgatgggccagtgcgatctggatgagcgtgacctcgcctgtgcctgctgcagcgtcgcgctcgagagcggtttctactggctgtcgctcttgctcaccatgtcggcgcggcatggctcagactgtggccacaagcaagaggagaaggcacggaggccaaatggaagacgccggagtgagacgaggagagcttctgtggcattaaacgtatggcaaccacaagttgttcgtggtcgtcagaagcagttggttcagcaatgcacagttcctgttgattcccgtcttagtgatctaaacatggagctgaaagtttgtaagcaacaaatagcaacttataagaatgcctatagcaaggagaagcacaagctgaatgattgtgaggaagcattgaaacgagcaaagtatcacccactgcaggatagtcatacaagtggaactatcaatgagccacgtgcaaagaggaagaaactgaaatga

SEQ ID NO: 221 - DNA, 240 bp, Zea mays
atgtacgacaagctccggcgcagccgccacttggacgcggtgcagagcggctgctccgcgctgtccatcgtcaagcagggggacctcatggtcgtcaccaatgtcggcgactctcggctcatcgtccacctgaagcccaacctgccacaggaatatcgcatccagtggtgcaacgaccaggggtactaccttgctgatgagtccggggtgcactttgatagtcgcctagagggggggtga

SEQ ID NO: 222 - DNA, 631 bp, Zea mays
agaaatggaccgtgttcttggtccattccctccacgtgcaaataaatggcgcaatgggtagcttgaagatgtaaaattcgctctctagtacacaggttgcgctattgtatgttagttaggacgacgcgctgctcgcatagtcgcattgcactctctatttgtgcttctgcttggtggaaaactggaaatgaagatcggtcgagatctttttccttttgccgtttgatgcagagctcccttctccataggaagttctatccaatatccacgggtaccacgtgtctctatgcctgctgcattgagagactaccagtctaccaccacgttgcacgcacggcagaaccaaccttttccgttcgctgaattcacttcaaacattgccattcggagtgaatcggttcggttgaagtcttcaagaggaagtgatagtgcacagctacgcatacacatcaaccgtctgcgcaggaagtgaaactaaagaatgagccagcgccaaaccaagaccgggccggctcccatgtacgaaacaccgacacactcgacttgtaaccccgaccaggttcgactcctagtcctatgctgtatttacagagttcgcaacgccgtccgtcttctctcctgatctggtgcc

SEQ ID NO: 223 - DNA, 1823 bp, Zea mays
tcagccaagccacccaccgcttttacccaccgatcggcgttgccgccgctagcattgtcggcttcagctccatccaaatccaccgccagcaagcaagcaagcaagccggcgccatgggtctgccgatgaggagggagagggacgcggaggcggagctgaacctgccgccggggttccggttccaccccaccgacgacgagctggtggagcactacctgtgccgcaaggcggcggggcagcgcctccccgtgcccatcatcgccgaggtggacctrtacaggttcgacccctgggacctgccggagcgcgcgctcttcggggcccgcgagtggtacttcttcacgcccagggaccgcaagtaccccaacggctcccgccccaaccgcgccgccggcaacgggtactggaaggccaccggcgccgacaagcccgtcgcgccgcgcggccgcacgctcgggatcaagaaggcgctcgtcttctacgccggcaaggcgccgcgcggggtcaagacggactggatcatgcacgagtacaggctcgccgacgccggccgcgccgccgccgccaagaaggggtcgcttagggtaagcccatctttttgtcggaattgaagacgggtccgttttaatttgatctgcgctggacgaatttagctaatagtctgatcgaattgaatcgtcgtgcagttggatgactgggtgctgtgccggctgtacaacaagaagaacgagtgggagaagatgcagctggggaagaccgccgtcgccggcgtcggcgccaccaaggaggaggcgatggacatggccacctcgcacacgcactcccactcccaatcacactcgcactcgtggggcgagacgcgcacgccagagtcggagatcgtggacaacgacccgttcccggagctggactcgttcccggcgttccaggacccggcgatgatgatgacggtgcccaaggaggagcaggtggacggctgcagcgccaagagcggcaacctgttcgtggacctcagctacgacgacatccagggcatgtacagcggcctcgacatgctgccgccgcccggggaggacttctactcctcgctcttcgcgtctcccagggtcaaggggaaccagcccgccggagccgccgggttgggacagttctgagctgaggcgaggatggagccatggatcaggagatgaagacggttgcgaactctgtaaatacagcataggagtcgaacctgaccctgacccttgttggggttacaaggttttccgagtgtcggtgtagcgtacatggagccggcggcgcggccgggccggctcattctttagtttcacttccgaagcagacggtagatatatgtgtagctgttcacttaaactctcttcgacagaacaaccgacgaaattttgctcttgtttataagaactaccttgactgtcgcttccctttgtctgtctcttccctaccctgtgttgtgtacttgtattggcatgcttgcagttgcagcgaccacggggacagcggcgggctcaggcctagatgtgtcaacagagatccgatacccgataattttcgaagattttaatctccatgtacagatctggaagaaattcttctccattggatatgagtatgtgtacgaagattttaatccctgagtacaaatttgggagattcttccgtattggatatataagtatggtatgaaaaaacagaactctgaacctaattgtccacggataatattcacacagtaataaaattaggtgtgtatctttataggaaacaagcctaacaactaaccctaactctctcaaccttttaag

SEQ ID NO: 224 - DNA, 1246 bp, Zea mays
cgcaagccagtgccgcgcccagatctccgcgacagatcagtcgttcgtccagctaactgcactgcacgcaatggccaccacggcgaccgaggcgaccaagacgactgcaccggcgcaggagcagcaggccaacggcaacggcaacggcgagcagaagacgcgccactccgaggtcggccacaagagcctgctcaagagcgacgacctctaccagtacatcctggacacgagcgtgtacccgcgggagccggagagcatgaaggagctgcgcgagatcaccgccaagcacccatggaacctgatgaccacctccgccgacgagggccagttcctcaacatgctcatcaagctcatcggcgccaagaagaccatggagatcggcgtctacaccggctactcgctcctcgccaccgcgctcgcactcccggaggacggcacgatcttggccatggacatcaaccgcgagaactacgagctaggccttccctgcatcaacaaggccggcgtgggccacaagatcgacttccgcgagggccccgcgctccccgtcctggacgacctcgtggcggacaaggagcagcacgggtcgttcgacttcgccttcgtggacgccgacaaggacaactacctcagctaccacgagcggctcctgaagctggtgaggcccggcggcctcatcggctacgacaacacgctgtggaacggctccgtcgtgctccccgacgacgcgcccatgcgcaagtacatccgcttctaccgcgacttcgtcctcgccctcaacagcgcgctcgccgccgacgaccgcgtcgagatctgccagctccccgtcggcgacggcgtcacgctctgccgccgcgtcaagtgaaaaaaagaagaagaagaaaaaaaacataataccctgcgttcctgctgccccggctgtctggcccccactactgccaccgacggcggcgccgaacccccgttccaatcatcatatcgtagacgacgcgcagcattaaactatcaatcaccggatctggctctttcttggccctgtactgtactattaatgttccgttcttgtttttttattcggaattgtcgccgtttcagtatacgtaaatctcgaggtcgataatacagtaatactaccaatttaactgtatactcctaccgtctggatggttttgttttgttttgtttcgttctccctgcgcgtgtcgaaattccgatttcgaattatttggtcaaaacccaagctgtc

SEQ ID NO: 225 - DNA, 1341 bp, Glycine Max
aacatctaccagcataacacaccttactctgccaccaagaatgacacctacttcaagttggtcacagaaacttacctaggcctcaccacatgtcaggcactgatgggtcagaattactatgcctctgatggcattagagttggttctgagctcacagttccagtagtatgtgcttgtcccactgaaaatcagacagaaagagggatcacttccttgctggtttactcagtgaaaaatggtgacactattaagtccattggagaggtttatggtgttgatgaacaaagtatgctagaggccaatgggttgccagtgccaacaagcacagagaacagcataatcatctatgccctaactcctatcttagttcctctcagaggcaagagttgcaaagaggacccggatagtttctattcaaatatacagatgtttctggctagttactgcatccaactgaatttgaaaaatttgtccttgtttgtatatttgcagaagctctcattttatggaaatagagaaatggccaagcttttcacagctgaggagctgcaaagagcaacagataactacaacaggagtaggtttcttggtcagggtggtcagggcacagtgtacaaaggaatgttactagatggaaccatagttgcagtgaaaaggtcaaaaaagattgaaaggaaccaaatagagacttttgtcaatgaagtggtgattctatcccagatcaaccacaggaacattgtcaaattattaggttgttgtcttgagacagaagctccaataataatctatgaattcattcccaatagaacattttctcaccatatccatgggagacaaaatgagccctcccttctatgggacatggcatatatgcattttgcagcttctattcccattttccatagagacatcaaacccaccaacatacttttagacagtaactacagtgctaaagtgtctgattttggaacatcaagatcagttccactagataagactcatttaaccacagatgttggaggaacttttgggtacatagaccctgaatattttcagtctggtcaattttcagataaaagtgatgtgtatagttttggagttgtgcttgtagagctcataactggtagaaagcctatttcattcttatataaacatgagggtcagaatctgattgcagagtttatctcttccgtgaggcagaaccaagtttatgaaattttagatgccagggtacttaaggaaggaaggaaagatgacattcttgccgctgcaaatcttgcaatgagatgcttgagacttaatgggaagaaaagaccaacagtgaaagaggtttcagcataa

SEQ ID NO: 226 - DNA, 717 bp, Glycine Max
aacatttcatttcccaattctctttttcttcactcacacacacgtgctccctttctctcccatcaacccaaatcccttttctcgttcttcccaattccaatttccaattctccggccatgtcaaccgcggcagcggcggggggcgacatggaggcgggtttcgcgaagctccagggcgaggactttgagtattacatgcagacctactccatcgtcctcggccgcaactccaagaagtccaccgtggacgtcgacctatccagcctcggtggtggcatgaacatctcccgccaccacgctcgcatcttctatgactttgcccgacgccgcttcgccctcgaggtcctcggcaagaatggctgcctcgtcgagggcgtcctccacctccccggcaacccccctgtcaagctcgattcccaagatctcctccagattggggacaaggagttctattttctcctgcccgttcgcagcatcttgggcgggcccgtgggcccgaggcattaccctaaccacgctactcccgggccggttgttcctcactataataattaccatttgggccccggcccggtgaagaaggcaccgcggagggagtattatgaggaggagtttgacgatgaagatgatgttggtggaaggaagatgcggagggatgggtatgatggctatggctacgctggtggcaagtcttcgctgtcagcacctatgggttag

SEQ ID NO: 227 - DNA, 2220 bp, Glycine Max
aagaaccctgttgaaaaatcagaggctgagaaagagttagacatgttgtgggctgaaatggagatgttgcttcgagctggagaaattgggatccaggttgatgaagcaagagcaaaggaagaaaatccagccttgcagtgcaagcatgacactatttttaatgaggagattggggtatactgcagattgtgtggttggattgccactgaaatcaaatacatcatgccaccatttcttaaatatttatttgctaatttgctaattcgtggttgttctgacttgattatcatgcttaatgaaatggtaggaagtactgatgtatgcgtccttgtgcatataatacaggtggattccaaaagatccggtagagaggcatttcctggtgcatggaaaacctcacagtttgatggagctacgtttgatgattgtggaacagtttgggatattatttctgacattaaaaaaggcttgtttcctcatcaacaagaagggtttgagtttatttggacaagtttggcaggaaccaccaaccttgctgagttgaagagggttgacccgggtactgagggtgggtgcattatttcacatgctcctggaacaggaaagacaaagttgaccatggtgtttcttcagacatatttgcaactgtttcccaagtgtctacctgttatcattgctcctgccaacatactgcttacttgggaagatgagttgaggaagtggaacataggaattccattccataacctgaacaatgctgaattgtcaggaaaagaaaatgtaattaatgaatttggttatcaagagctgaataaggatgccataagaatgctgaagctgtgttcatggtacaaagagaagagcattctgttaattagctacaatttatatgagaagctagctgggggaaagtctgaagatgatggggagaaagagaagaaaaacagaaagattcggaaagagaagaaacgtgcaagcattgaaactgcgatgggaaaggttctgcgagactatcctggtttattagttcttgatgaagggcacacaccgaggaatcagcgtagctgtatttggaaggttctttcagaaagtagaagtcagaagcgaatccttctttcagggactcctttccagaacaattttctggaactcttcaatattttttgcttaatgaaaccatccttttctgacaacataccgcaagaactgaagaagttttgccaaagtaaactgatacaggaaaggaaagcttcaaaagatgtgagttgggagtccattaattctggaaatccggctgacgagaaaataaaacagctgaaattgctgatgaatccctttgttcatgttcacaaaggtagcattcttcagaagaaccttcttgggttacaagattgtgtactgattttgaagcccgaaatcttgcagcaaaaaattctggatagcattgaatgttctcaaaatggactcaattttgaacacaaattggccttggtctctgtacacccatcccttttcctcaactgctctctctcaaaaaaggaagaatctgttattgacatggatcagttaaagaagtgtagattggactcttatgaaggggtcaaaacaaaatttttgatggaatttgtgaatttatgtgatgcagttgatgagaaagtccttgttttcagccaatttattgataccttgatcttaattaaggaccaactcgagtcagccttcaattggtctgagggcagagaagtgttgtttatgcatggcagggttgaccaaaagcaaaagcagtccctaattcatagtttcaatgatgccaatagccaagcaaaggtgttgcttgcttctataaaagcatcttctgaaggaattaacttagttggagcttcaagggtcgtgcttcttgatgttgtttggaatccctcggtggaaagacaagctatttgccgagcatatagacttggacaaaagaaggttgtttacacttatcatcttcttgcacaaggcacccctgaatgcaccaaatattgtaaacaagcagaaaagaaccggttatctgaactggttttctcaaatagaaatgctgaaagtgataagctcaagagaagtggagtaattgaggataaagttcttgatgccatggttcagcatgaaaaactcaaggatatatttggtgaatgtctggttcaaccaaaggagggagatcaggagactttgtgcccctga

SEQ ID NO: 228 - DNA, 561 bp, Glycine Max
aagtttcaattattcaatcctaatatacttcgctctaaaaagcgagcgagagacaacaacaatagtagaaacaacagcaacaagcattctgtgtatagaggtgtccgaatgcgcacgtggggcaaatgggtgtcggaaatccgcgagccgcgaaagaagaaccgaatctggctcggcaccttcgccaccgccgagatggcggcgcgtgcccacgacgtggcggcgctgacgataaaaggctcatccgccatccttaacttccccgaactcgccgcctccctgccccggccggcctccaactcgccccgcgacgtgcaggccgcggcagccaaggcggcgtccatggaggcgccgccgcggacccctccgtcgccggccgccacgccggaggatgacctcggcgagatcgtggagctgccgccgctcggaacgagtttcgactcgcccgaccggagttccgagtttgtgttcctggacatggacgacgggtggccctattctcacccgtgggccacagcattgatgatgtgcaagcttagcatgttctacaaattttggtaa

SEQ ID NO: 229 - DNA, 615 bp, Glycine Max
aatagtacatccatggatttttgcatgatagatgagaaaaaccctggctcttttgtccaatctgacattgtcatgaaagagaatgccagtttgaatgaagatgagggaagtgacaaatcagagaatgtttttcctgccaaacatttgaagttcaaaaggatgtctgatcatatgcccgaactcaaagtgcatgagcagcattgcatgaagaaccagaaacttgacaaaattgggaaccaggcagaagagattaatgcaggttcagatggacacagttctagtagttacactcgagaggatgataatgcttctgctctcaacttcaaagggaaaacaaaagctagtaagggatcagcaacagatcctcagagcctttatgcaaggaaaagaagagaaagaatagatgacaggctaagaattctgcaaaatcttgtccccaacggaacaaaggttgatataagcactatgcttgaagaggcagtccaatacgtgaaatttttgcagctccagaacaagcttttaagctctgatgatttgtggatgtacgctccgatagcttataatggacttgacctcgtactcaatctcaatcctaagagttctccacctttgtga

SEQ ID NO: 230 - DNA, 1941 bp, Glycine Max
agccaaaagacacttgtcttattggaatctagggcatggccgataatgacaagacaacccttgcagaagaagtatttaagaaactacaatctgaatatgatggagcatgtcatttgtatgtttgcatttaaatgtaaagctttgaatgttcatcattgcaacaaacattcactggttctgagctcatcaaaaatatgggctaacaccaatgaaagagaaaaatcaagtaaacatggaatagattctttgcagaaagaaattttttctagacttttagaaaatgttgtgaaaatagacaatccaaatgcatttcctattgatgttgatagaagaattggtagtatgaaagttcttattgttctcgatgatgttaatgattcagatcacctacaaaaattactgagaactccttataagtttggattaggtagtagaataattgtaacaaccagatacgtgcaagtgcttaacgctaacaaagctaacgagacaaaccagcttggagagttcagtttagataaagcccttgaacttttcaatttgaatgcctttaagcaaagtgatcatcaatgggagtacgatgaactatcaaaaagggtggtcaattatgccaaaggcaatccattagttcttaaagtcttggctcaacttctttgtggaaaaaataaggaagaatgggaaggtatgctagacacgcttaaaagaatgcctcctgcagatgtttataaaatatttctagattttttggcatgtttctttcttagaacacatacaatggtagatgtgagcgatctaaaatctttattgaaagattatgaaagcgaggaatcagtgacttattggttaggaaggttgaaagacaaagctcttataacttactccgatgataatattatagctatgcatgaaagtttacaagaaatggctttggagattgttcgtcgagagtctagcgaagaccctggaagttgcagtcggttgtgggatccaaatgacatttttgaagcattgaaaaatgacaagatgaacagactacaatttctggaaatttctgggaaatgtgaaaaagattgctttgataaacatagtattcttgcagaagggcttcaaatttcggcaaatgaactaagatttctttgttggtatcattatcctctaaaatccttgccagagaatttttctgctgaaaaacttgttatattgaaattgccaaagggagaaataaaaaatctttggcatggagtgaagaagaatctggtgaatttaaaagaacttaacctcactgactccaagatgttagaggagctgccagatttatcgaatgccagaaatcttgaagtactggttcttgagggttgttctatgttaactacggtgcattcatctattttctctctaggcaaacttgagaaattgaaccttcaagactgcacgtccctcacaacactcgcaagcgattcctgtttatgcagcctgaagctgagattaagatggacgaaagtcaaagcattttcctttacatttgaagttgcaagcaagcttcaattactacttctcgaaggaagtgtctttaagaaattaccttcatctataaaggatctaatgcaactgtcacatctaaacactgtattgttcccttcaacggctaatgaacaactaagggaaaacaggaaagaggttctgttctggaattgcttaaagttgaatcaacgatctcttgaggccattgcgttgaatgcacggatcaattatggagacacaaccttggaaagaattgaagcaaacaatactataagtgatggtgagggtgaaggtaaaaaggatagtgtcgaaatagtccagagccattccgaaagatcaataaaagaaacaataaatttagaatatgggtttgtttgctacacagaccatagccaaattcttgcatgtactagtgcatag

SEQ ID NO: 231 - DNA, 490 bp, Glycine Max
aggaagacacgtggcaggccaccaggctccaagaacaagcaaaagatcatttccttccctgtggcccaacccagtgagccatttgtgaggatcgtcatcatcaatgtggacccaggtagggacatcatggagtccattcttgacgttgctcgccaaggtaatgtcaacctcactgtccttagcacctctggcacagtcaccaaggtgacccttcagaactcactccatggggctgctgccctaacactccatgggcccttcaccttgctttccctcaatggctcatacttaatcaacaaccaccacaaccttaactctggagccacccttcctcctccttcatcctttggaatccacctctccacctctggaggccaagccattggtggtgtcattggcggccaagtcattgccggtgacgatgttaagataacggtctccatcttttggaatcctgagatgtacaagtatattcctcaaggaaacaatg

SEQ ID NO: 232 - DNA, 366 bp, Glycine Max
atatcagaggatgaattaagttgggagaaggtggaagcagttgatggtgacgaatcttctggcccacgtccaggtgatcaagagcttaaagaaatgcttcttcgtaagtatggtggttatcttagcagcttgagaaaggaatttctaaagaaaaggaaaaaaggtaagctaccaaaggatgcaaggatgatactcatggactggtggaacacacactataggtggccttatcctacggaggaagagaaagtgcagctatcagaaatgaccggacttgatcaaaagcagatcaataattggttcatcaatcaaaggaaacggcattggaaaccaacagaggacatgcgatttgccattatggatggt

SEQ ID NO: 233 - DNA, 1143 bp, Glycine Max
atgaaaatgacacggatcttccttacgaccctttcattgtggctcttggtcctcgctccttccaaggccgaggagggatttcccgacaaacttccatcaacatttcattctctatttccgtttctcggtcgtcaagatgacctgaacaagccacaaaagggtcctaatgacgagtctcaacaacagaacgtgcctcaacaagcggctgaccaaaatcctcagatactcagccaagatttctacattaagacttgccctaatgcacaaaaaatcgtggccgatgcacttgccaagattgttaagaccaatccgggcgcactcggaaacttactccgccttcaattccatgactgcttcgttaatggatgcgatgcatccatcttgctagattactcgccaagtggcgacgctgtggagaaaagttcaatggtcaatggtctactcctcaaaggagctgatatgatcgatgaaataaagttgaagctggaggagcagtgtcctcaaaccgtgtcatgcgctgacacattggcatttacagccaacgaggtaatgaccatggcgggtttggcccctcagaaacccctcggtggccgtagagacgcgctcgtttcccttgcaaccgctgcagaaaccgacaacatccctatgccaaactggaccatggaacaaatggtaaaactcttcaacaagaagggtttcaacatcgaagaaatggtgatcctactcggtgcacactcgatcggcatggctcattgcgacttgttcattgaaagggcatacaacttccaaaacacagggaaaccagacccttcccttactgtggaagtgcttgaggaattaagaaaggcatgccctaatcttaatacacctaagtaccggaaccccccagtgaactttgatgcaacaccaactgtgcttgataacctcttctacaaggatatggtggagagaaagagaactttgctcattacagattcgcatatattggaagatcctaggactttgccaattgtgcaacagtttgcacatgacgctagcttgttccccaggagatttcctgaggtcatgcttaagatgagttctttgaatgtgctcacagggaatgaaggtgaggtgaggaagatttgtaggtccaccaattaa

SEQ ID NO: 234 - DNA, 2391 bp, Glycine Max
atgaaagggctccttggttcctttttggttgtgttggtgttggtggagggcctcacccacaacaacacaatgacgagtgaggctgaaaagagtgcgtcttgcaatgaggagtgtgagaaaggtgctgcttttgcgttgtcgtcttcaacatgttcatcctctggctcctcctccgcacgtgtgtcttcttcttatcttgagctttggcacgcttgtgctggccccctcacttccctcccgaagaaagggaatgtggtggtctatttcccacaagggcacttagaacaagcttcatctttctctcccttttcaccaatggagatgccaacctatgatcttcagccacagatcttttctagagttgtcaatattcagctactcgccaataaggagaatgatgaggtttatacacaggttactttgcttccccgggctgagtatttagagggaaaagagcttgaggaattgggaacagatgaagagggaaatgaagcaacacctacaaagtcaacccctcacatgttttgcaaaactcttacagcctcagataccagcactcatggggggttctctgtccctcgcagagctgctgaagactgttttcctcgtttggattataagcagcaaagaccttctcaagagcttgttgccaaagatttgcatggtgtggagtggaaatttcgacatatttacagaggtcaaccaaggcggcatctgctcactactggctggagtatttttgttagccaaaagaatcttgtttctgagatgcagttctctttcttagtgtctagaattgttatactgggtgaaaatggagaattgagattgggaatccgaagagctgctcgaccgagaaatggtcttcctgaatcaattgttggtagccagagttattatcccaatttcctttcttctgtggctaatgctatatccgcgaaaagcatgtttcatgttttctatagtccaagagcaagtcatgcggattttgttgtgccctaccaaaaatatatcaaaagcatcaagaatccagtgaccatcgggacaagattcaaaatgaaatttgaaatggatgaatctccggaaagaaggtgtactagtggtatagtgactggaatgagtgatttggatccctataaatggcccaagtcaaaatggaggtgcttgatggtcagatgggatgaggatattgagattagtcatcaagatagagtatctccatgggagattgatccttcttcgtctcttcctcccttgagcattcaatcctccagaaggctgaagaaactgaggccaggtctgcaggctgccacacccagtcacctcaccactgcaggaggcagtgggtttatggactctgaggagtcagtaagatcatccaaggtcttgcaaggtcaagaaaatacgggttttatgtcactatattatggatgtgacaaagtaactaagcagccagaatttgagatcagatctccaagtcatcctaatcttgcatcaactggagtgagaaagatttctgctgctgagtttatgagggttcacccttctagttttgcaggcttttcggaaactaacattgttccaagggtcttgcacggtcaagaaatatctgttggggccaaacccaatgtcagttactcaaataacaacctgcatcaggcaaccaaacctagctttcactctttaggaccagaagttattcaaactgcatatttcccttatggtgatattcacaatgctggtcaaggtagcagcatcttgtgctccaaaccgaccaatttccaacgagagaatatcccatttaacactccttctactcagtcagggatcatgagaaatgaaaagctgcaggacaatatttctggtactgcttctttaggggcaaacatgaggattccaaaggatgacaatttcaaggggcaggtaaaagcttgtaaactatttggaatttccttgtccggggaaactaccgcccaaaatttacagaactctgctaaaagaagctgcacaaaggttcacaagcaaggtagcttagttggaagagccattgatctctcaagattgagcagctacaatgacctgctgattgaactagagagactatttagcatggaaggccttctaatagatcctaataagggatggagaatcctctacactgacagtgaaaacgacattatggttgtgggagacgatccgtggcatgagttctgcgatgtggtatccaagattcatatacatacacaagatgaggtggaaaagatgacaattgggatgatgatcaatgatgatacccagagttgtttggaacaggcaccagtgacgatggaggcttcaaagtcttcctctgtgggtcagccagattcttctccaacagtggttagaatgtag

SEQ ID NO: 235 - DNA, 1200 bp, Glycine Max
atgaaaggtatgaatttggatgcatataggttctctatctcttggtcaagaatcctcccaaatggaaaacttagtggaggtataaatcgagaaggaataaattattacaacaatctcatccatgaattgcagactaaaggtttaaaaccttttgtgaccctttttcattgggatctcccccaagctttagaaaatgagtataaaggcttcttatccgagtccattatagatgattttggagactatgcgaaattttgtttcgaagaatttggagatagggtgaagcattggattacttttaatgaaccgcatatttttagctcgcatggctatgcatatgggacgaaggcaccgggtcgtaagtctcaggggctccgtccagacagtggagggacagagccttatcgtgtttcacataacatacttcttgctcatgcaaaagctgtccaattgtataggaattcctataaggaatctcaaaatggagagataggcataaccctcgattctagatggttcgtgccctattcagatgcttcttcagacatagaagctaccgaacgagcacttgacttcgagattggatggttcatggaaccattgacatcaggaaagtatccagaaagcatgcagctttatgttggtagacgattgccagagttctctaaagaggaagccgagcttgtccgtggatcatttgattttattggactaaactattacaccaccaataccgcgcgcgttgccactggctatacggactcagtgcatcatcatccagatctatctactgatcctaatgtcgaacttggatgtaagggatggttatgtgtttatcccaaaggaattagagaattgctgctccgtatcaaaaacctgtacaacaatcccttgatttatataactgaaaatggaataaatgaattagatgatccaacactatcacctgaggaatctcttatggatttttacagaattgattatcattatcgtcatctattgaatgttgattatgcaataagggatggcgtgagagtaaagggatattttgtctggtcactgctggactgctttgaatggagtaatggttatatacctcgatttggattgatttttgtggatcacaaaaataatttgaaccgatctccaaaactctctgcaaaatggttccggaaatttttacaaaatcgactgctttga

SEQ ID NO: 236 - DNA, 861 bp, Glycine Max
atgaaattcggaaagagcctgagcaaccagatcgagaaaacgctgccccaatggcgtgacaagttcctgtcctacaaggagctgaagaagaagttgaagctcgtggagcccaaacccattaatggcgtggaagaacgccccaccaaacgcgcaaggcacgagggagacatcatcatcatgtccaaggaggaaactgacttcaggaactccatcgaacaagaactccacaaattcaacaccttctttgtcgagaaagaggaagaatgcatcatcaaattgaaggagctacaggatagggttgccaaagtaaaaaattctaatgagcaattgatgcaaattcgcaaggaaattgtggatttccatggagagatggtcttgctcgaaaactatagtgcccttaactacataggattagtgaaaatactaaagaagtatgacaagagaactggtgctctcattcgcttgcctttcattcagaaggtcttgcaacagcctttcttcaccactgaccttctatacaagcttgtgaaggagtgtgaaacaatgcttaaccaccttttcccggtgaacgatccttcgacttctggcgaggcacctccccaagctgaggagggatgtgatgcttcaacttcaaccagcacaaagagtagtgatgatctgctgatgcctaaggagttagcagcagccaaccatcacattgagagcctttatatgaagagtaccatttcagctttgcatgttttgcaggaaattcgaaagggaagctcaacagttagcatgttttcattgccaccattgcagataagtggcttggaagaaacatggaacaaaatccctattctggaacaaacagccaagtaa

SEQ ID NO: 237 - DNA, 840 bp, Glycine Max
atgaacggcggcgctgaggcctccgtcaatcacaggcgcagacaccaagcagcttccgctaacggcgttaagatagcaaacggggccatggcgaagccgtcctcgacgctctgctacgacgcctcgttcatgaaatggaccgtggcggatgctgtccacgtggcgacgcatcattggatgccgtgcttattcgcattagggcttctcttcttcatggccgtggaatacacgctcctcatggttccgccgtcgtcgccgcctttcgatctgggcttcattgccacgcgttccctccacgcactcctcgagtcatcgccgaatctcaacacgctcttcgccgggctcaatacggtgtttgtggggatgcaaacgagttatatcttatggacgtggctgattgaaggacgccccagagccacgatttcagcattgttcatgttcacatgccgtggaattttagggtactccacccagctcccattgcctcagggatttttgggctcgggtgtggatttcccagttgggaacgtgtcgtttttcttgtttttttcggggcatgttgcgggttcagtgattgcttccttggacatgaggaggatgcagaggtgggaactggcttggacttttgatgtgctcaatgttttgcaagctgtgaggttgctgggtacaagaggacattacactattgatttggccgtaggggttggtgctggaattctctttgattctttagctggcaagtacgaagatagcaaaaggaatgctgctctatccacaacccacagagcacaatttgattgcgtcaacaatgtggatatagctaaaaaaattaacaaatga

SEQ ID NO: 238 - DNA, 1266 bp, Glycine Max
atgaacttcaggaactttggtgataataatagtaaccaccccacttgggatgccatgcatgggaagacaccagcaaacaatgttactactctgctgagacagccctcaacaatatactcattgacatttgatgagtttcagagcacaatgggtgggattgggaaggattttgggtcgatgaacatggatgaactcttgaagaacatatgggcagctgaagagactcaagccatggcattttcagctggtgcagcaggaggagaaggccataacaacaaccctattagtggtggtttgcaaagacaaggttctttgacattgccaaggactcttagtcagaaaacagttgatgaggtttggagggacttgatcaaagatagtagtggtggggccaaggatggtggaagtggcaatggtggctcatcaattcctcaaaggcaagcaacattgggagaaatgacattggaggagtttttggcgagagctggggttgtgagagaagatgtgcctcaacaacaacaacaacaacaaattggaaaaccaaacaacaatggatggtttggtgactttcctagaccagacaataacaacactggcctactttttgggtttcaacaaccaaatagaagcaacgggaatttgggtgagaacactaacttagttcccaaacaacctcctcctcctttatcattaaactcaaaccactcccaaagacaagcacaacagcaccaacaacagccaccaccactttttccaaagccagcaaatgtaacttttgcagctgctcctatgcatttgttgaacaatgcacaacttgctagccctggcagaaggagagggttgattggagttgctgagcattcgatgaatgttggaatggttggtttagccacagctaatgtcacagcttctgcctcaagtaaaatatcacctgatgttattacaaggagtaataatgttgataactctccaatatcaccgcattatgtaatcaacaggggaaggaaattcagtgccatagagaaagtggttgagaggagacaaaggagaatgataaaaaatagagaatcagctgcgaggtcaagggctcgtaagcaggcctacactttcgaactagaagctgaggttgcaaaacttaaggaattaaacagagaattacaaagaaaacaggaagaaatcatggaaatgcagaaaaataaggatttggaccctgcatgcagaccaagggatgatatacaagaaaacacaaaagctttttcgtgttag

SEQ ID NO: 239 - DNA, 2991 bp, Glycine Max
atgaagaacattcttaagaagcttcatatcatgtccaatcaatcagaagatgcccaaggggctacttcatcaaagagcaacaagtccagtgatggttcatcttcatccactgcccctaagaagctttccaattggttgcattcagtttctaataggcagagtcccagtcctccatctcccatcctggctagaggagaaagaatggagccatctgattcagtgagcagtggtggtttggatgttgtgtctgattcagcgaggcgtgattcggagtctagcacgtcgagggatcctgaagtggaggaggagtatcagatacaactggctttggagctgagtgcaaaagaggatcctgaggctgtacagattgaagctgttaagcagatcagtttgggatcctgtgaccctgataatacaccagctgaagttgtggcctaccgttactggaattacaacgctcttggttatgatgacaaaatctcagatggtttctatgatctgtatgggatcttgactgagtcaacctctgcaagaatgccttctcttgtagatctgcaaggaacaccaacctcagatgatgtcacatgggaagcagtcttggtcaacagggctgctgattccagtttgttgaaacttgaacaagaagccatggagatggctgtcaattcaagaaaagattttgaagtacttgtagatagtgatttggtacacaagcttgcaataatagtggctgactatatgggtggatcagttgaagatcccgaaagcatgtcaagagcatggaggagtcttagttacagtctaaaagctaccctcggtagcatggttttgccacttggttcactgaccattggattggctcggcatcgcgcattgttattcaaggttttagctgacagtttgggcatcccgtgtcgattggtgaaaggactgcagtatatgggttccaatgatgtggcaatgaactttgtcaagatagatggaagggagtacattgttgacctaatggcagctcctggaacacttattccatctgatgctactggatcacacattgagtttgatgattcttcctttgtagccagtccttcatcaagagagcttgattcgtctcacgtagcatcattcagcagtggggttggaagttcatctgaagaagcttcagactctgggactctggataaagataataaatcaaagtattttggctatgcagggaaagaatccgatgtaagcgggcctactacgggcaaggaagaattgaagaaaccatcaaatgaatccaaaaataccccctatgaggagaagatcatagtgcgagattcccctagcagacctaattatccatatatgcatggaagatctccttcttggactgaaggaatcagttctcctgcagtgcgtagaatgaaagtcaaagatgtttcccaatatatgattgatgctgctaaggagaaccctaacttggctcaaaaacttcatgatgttttgcttgaaagtggtgttgttgcacctccaaacttattttctgaaatttatcatgggcagttaagtaccctgactgaggccaattttccaactgaacaaaaagatgaaaataaacaaggaagtgtgcagcgagaaactaagactgatgacaatctagttcctgctcgatttttgcctcctttgcctcactaccgagttcagcgcaaagcaactcctagcactagcagggaagctgctggacagcacatatcatcacaggtagaagcaactcaggtaaagtatggaaaaaatatgccagttgcggcagctgcagctgcagctgctgctgttgttgcatcttctatggtagttgctgtaacgaagtcaaatgctgactcgaatcttgagattcctgtagcagcagctgctactgctactgctgcagctgttgtagcaaccactgctgctgtaagtaagcagtacgagcagggcagtcggagtgatggtgatgcagagggtgctggttgtgaatcgaagggtagtggtgatggagagcataatgctttaggagaaaactcagaaggcgagagaaaatctgatagatcagtaagtaatgacagcacaaaatctgattcagcgctagatgatgttgctgagtatgatattccatgggaggaaattgcagtgggagagcgtattggacttggatcatatggggaagtttaccgtggtgaatggcatggaactgaagttgctgtaaaaaagtttctatatcaagatatctctggtgaattacttgaagaattcaaaagtgaggtccaaataatgaaaagactgaggcatccaaatgttgttctcttcatgggagcagtaactcgacctccaaatctttcaattgtttctgaatttcttcctagagggagtttgtatagattaattcaccgacctaacaatcaattagatgagcgaaggcggttgcggatggcccttgatgctgctcgaggaatgaactatctgcacaactgcactccagtgattgtgcatcgtgatttaaagtccccaaatcttcttgttgacaaaaactgggtagtaaaggtatgtgattttggcttatcacgaatgaagcacagtacattcctttcttccagatcaactgcaggaacagctgagtggatggctccagaagtgttgagaaatgaactttcagatgaaaagtgtgacgtttttagctatggggtcatattatgggagctctctactttgcagcaaccctggggaggaatgaatccgatgcaagtagttggtgctgtgggttttcaacatcgccgtcttgacattccagataatgtagaccctgccattgccgatattatcagacaatgctggcagactgatccaaagttgaggcccacgtttgctgaaatcatggctgctttgaagccattgcagaagccaattactgtttctcaagtgcatagaccaattgctcagtcatcacgaattgctgaggaccccgcaggatag

SEQ ID NO: 240 - DNA, 642 bp, Glycine Max
atgaagaagatgattctaaccctcttcttcaatatcattttatctctcctctccctctcccacgcctccgtggtggatttctgcgtagcagactacacaggccccaatggccccgcagggtactcatgcaagagcccagcaaaggtcacggtggacgacttcgtctactccggccttggcaccgccggcaacacctcaaacatcatcaaagccgcggtgacgccggcgttcgacgcgcaattccccggcgtcaacgggcttggaatctccattgcacgcctagacctagcagccggtggagtcatccctcttcacacgcaccctggtgcctcagagctgctggtggttgtgcagggaacaatctgcaccggcttcgttgcttcggacaacactgtgtacctcaaaaccctaaaaaagggtgatgtcatggtgtaccctcagggcttgttgcacttccagatcaacgatggagagtctcaggctttggcttttgtgagcttcagcagtgctaaccctggcctccagattctggacttttctttgttcaagagtgatttccccactgagcttatcacgcaaaccactttcattgatgctgcagttgtcaagaagctcaagggtgttcttggagggtcaggttaa

SEQ ID NO: 241 - DNA, 1527 bp, Glycine Max
atgaagaatctttgtcagaattttgatgttagagccacgattccggttaaaataggaaaaaaatcgacttgggatgttttgtttcctcgtaggttgtggttgccgacgtggacgtgtgatcagaggaaggaggggaagttgaacttaaaggtgcagtgcggtactaggaaagaagggtgggttgaatctgcgggaaaaagcgcgtttgggtttggcgtttcggccgcggttttgttctctgtgttctgctactcgcccgcggcgcttgcagagtccctcaccgttgcttttcccgtgtctcgggcgcctgaggtaaatgcagttcaaagaactcttgtggaagcatggggtttaattcgagaaacatttgttgatcctacatttaatcatcaagattgggatttgaagttgcagcaaacaatggtggaaatgtttcccctgaactcagctgatgcagcatacacaaaactccgtggaatgctttctacccttggagatcctttcactcgaattatcagcccaaaggaataccaagggtttaaaattggaagtgatgggaacgtacaaggagtgggattgttcataaatgttgaaccaagaacaggacatttggttgtcttgtcatgtgtagatggcagtccagctgctcgtgctggtatacatcaaggggatgaattgattgagataaatggtgagaggcttgatggcattgatagtgaaactgcagcacaaaggcttagagggaatgctggaacaactgttacagtaaaggtcaaagactcaggaacaagatcttttatccgagaggtcaaacttcctagggagtatattaagctctctccaatatcaagtgccatcatccctcatagatccccagatggtcatttcacaaaaactggctatgtgaaattgtcagccttctctcagactgctgctgaagacatgaggaatgccattcaggaattggaaaatcaaggagtacactcgtacatattagatctacggaacaatcctggtggtttggtaaaagccggccttgatgttgcacagatgtggttagatggaaatgagactctagtgaacacaatcgatagagatgggaacatgctacccattaatatggtcgatggacatgctataacacatgatccacttgtggtgattgtcaatgagggaagcgcaagtgccagtgagattttagccggggcattacatgataacggtcgagctattcttgtggggcacaaaacatttggtaaaggaaagattcagagtgtcactcagcttcatgatgggtcagcactctttgttacagtggcaaaatatctatcaccagcccttcatgacatagatcaggttgggataacaccagatgtgcaatgcacaacagaaatgctcaattcaaccaaggatatttcaaattcaaccaaagacaaggcctcagtctcatctctggaagcagattcatgcataatggtagcagaacatgagttggatttggaggagtccatgggaactgcttcttga

SEQ ID NO: 242 - DNA, 1788 bp, Glycine Max
atgaagagggaccacaaagatagctgcggcggcggcggcgccgccggagggactgtgaagggtgagtgttcctcaatgcagtcaaacgggaaggcgaagatgtgggaggaagagcaacagcagcagcagcagcaacaacagcaacaacaacaacaggggatggacgagttgctggcggcgttggggtacaaggttcgtgcttccgacatggctgacgtggcacagaagctggagcagttggagatggtcatgggttgtgcccaggaagacggaatttcccacctggcctccgacaccgttcattacgaccctacagatctctattcctgggtccaaagcatgttaaccgaactcaaccccgaacccaacaacaacctcgatccatcttctttcttgatcgacaacaacaacaacatcatcaacagcacagcccctgttttcaacgacgattccgaatatgacctcagagccattcctggcatagcagcctaccctcctcctcttcctcaagacaaccacctcgacgaaatcgaaacggctaacaacatcaacaagcgcctcaagccatctccagcggaatcagcagactccgccgcgtctgagcccacgcgccatgtcgtcctcgttgaccatcaggaagccggcgtgcgtctcgtccacactctcctggcgtgcgcggaggccgttcagcaggagaatctcaagctcgcggacgcgctcgtcaagcacgtgggcatactcgcggcttcccaagccggcgccatgaggaaggttgcttcctacttcgcccaagccctggcgcgtagaatctacggaatcttccccgaagaaaccctcgattcctccttctccgacgttctccacatgcacttttacgagtcttgcccttatctcaaattcgcgcacttcaccgcgaatcaggccatcctcgaagccttcgccaccgccgggaaagtccacgtcatcgatttcggcctcaaacaagggatgcagtggccggcactcatgcaggccctcgcattacggcccggcgggcccccgactttccgtttaaccggaatcgggcccccacagcccgacaacaccgacgcgctgcagcaggtgggcttgaaattagcccaattggcccaaatcatcggcgtccagttcgaattccgcggcttcgtttgcaacagcctcgcggatctcgacccgaatatgctcgagatccgacccggggaagccgtggcggtgaattccgtcttcgaactccaccgcatgctcgcccggtccggatccgtcgacaaggtcttggacactgtcaagaaaattaatccccagatcgttaccatcgtggaacaagaagcgaaccacaacggaccgggttttctagaccggttcactgaagccttgcattactattccagtcttttcgactcgcttgagggttcgtcttcttcttcgaccgggttgggctcgccgagtcaggatctgttgatgtccgagttgtaccttgggagacagatttgcaacgtggtggcttacgagggcccggaccgggtcgagcggcacgagactttgactcagtggagggggagattggactcggccgggttcgacccggttcatctcgggtccaacgcattcaagcaagcgagtatgctacttgctctattcgcaggcggtgatgggtatagggttgaggagaataacggctgcctcatgcttggctggcacactaggccactcatcgctacctccgcttggaagcttccctcctccagcgagtctagtggcttgactcagtga

SEQ ID NO: 243 - DNA, 642 bp, Glycine Max
atgaagccattcttgtcgaatcatactgattctatgtacaattgttcccaagttggttgtagtcatccaatggctcatacttcttatccctgtggtgatccttattttggtagttcaatagttgcttatggaccacaggctattaatcaacaaatggtgccccagatgctgggattagcatccaccagaattgcattaccagttgatcttgcagaagatgggcccatttatgtcaatgccaaacaataccatggtatactgagaaggcgacagtcacgagcaaagcttgaagctcaaaacaaactcatcaaaagtcgtaagccatatcttcacgagtctcggcaccgccacgcattgaacagggttaggggatctgggggacgctttcttagcgccaaacagctgccacagtctaatgcagaactagtcactgatgcctatcaaaagaaagatgcatcagaggcagaaaatcatccctcaagcaccggtgaaaatgcatctatcacattcacagccatctctgccttaactagtatgtccagtaacagtgtcaatttccccaacatggctggatcatcgcaatgcagtgggggactcacctttggtgctggagctctccaatgtacttcagttggccgatga

SEQ ID NO: 244 - DNA, 201 bp, Glycine Max
atgaagctcatcaaggttgactgtttatatatgttttcatttcttagtttaaaaacaaagaacatatttaaaaacaaagaatcttttttaatttttattacgcaaaaattgggtgttacacaagatgtatatggtggtaatttttccttgtatggaatcctaatacttttagtaaatgataagtccacattattggtgtga

SEQ ID NO: 245 - DNA, 2949 bp, Glycine Max
atgaagctttggtgttgtccatggctatgcttcactgaagaagaagaggaagaagaagaagaagagcgcaaatttcccaaacctatgaaggaaggagacatcattttcggaaacgtcgtcgtttccgacgacgacgacggcgacggagacggaaacgatacccgcggcgacgataagcaattcgcgatggtccgcgccgatgtattgggctcgtggcccggcgagagcagctccaccgccgccgccgagtgtttggatatcgccgccgccggcgagagccgcgatttgagcaacaagcgcgccaagttctacgccgacttcgaggagcatcacttttcaaccgggaagtgcagtgcatctaatgaatacgttgattataactttagtattaaaggcactcttcgacccaacggtgagacttgctatgatgcattttcattgatgggtgttgttgaagagaatagtagtggcttcgattcccgcattgtgaaagagggtggtgagggagatgatagcgatatctcgaaagtggaagaagatgtagaggtcagaatggatctcaccgatgacttgttgcatatggttttttcgtttttggatcatcccaatctctgcaaagctgccagggtttgtaagcagtggcgaggtgccagtgctcatgaagatttctggaaaagtttgaattttgaagatcggaacatatctgtagaacaatttgaggacatgtgtagccgttatcctaatgccacagcagtgagcttatctggttctgctatttacttgcttgtcatgaaggccatctgttcattaaggaatctagagtttctaacattaggaaggggacagatagctgatacttttttccatgctttagctgattgttctatgttgagaagattgaatatcaatgattctatacttggcaacggcattcaggagataactattaatcatgacagattgtgtcatcttcaattaacaaaatgccgtgtgatgcgaatagcagtcaggtgcccacaacttgaaactatgtcgttgaagcgcagtaacatggcacaggttgtgcttaattgtccacttttgcatgagcttgatattggctcttgccacaaacttcctgatgccgcgatacgagctgctgcaacttcatgccctcaactggtctcactggacatgtcaaattgttcatgtgtcagtgatgaaactctgcgtgaaatagcattgagttgtgctaaccttagttttcttgatgcatcatactgctcaaacatatctttggagtctgttagactgccaatgttaacagttttaaagctccatagctgcgaaggcattacttctgcctcaatggctgcaatagctcatagttatatgttggaggttttggagcttgacaattgcagcctgttgacttcagtgtctttggatcttcctcgtttgcagactattagattggtacactgtcgcaaatttgctgatttgaacatgagaactatgatgctttcttctatactggtatcaaactgccctgcactccatcgtatcaacatcacttcaaattcacttcaaaaattagccttgcaaaagcaagatagtttaaccatgctagctctgcaatgccaatctttacaagaagtggacctctcagagtgtgaatctttgacaaactctatatgtgatgtttttagtgatggtggaggatgccctatgctgaaatcactagttcttgataattgtgagagcttgacatccgttcggttcatcagcacctctttggtcagtctttcccttggtggttgtcgggcaattacttctcttgagctcacatgccctaaccttgagaaagtcattttggatggctgtgatcatttggaaagagcatccttttgtcctgttggccttcggtctctcaatttaggaatatgtccaaaattgaatatactcagcatagaagccatgtttatggtctcacttgagttgaaaggatgtggtgttctgtccgaggcatcacttaattgtcctctcttgacatctttggatgcttccttttgcagccaactcactgatgaatgcttgtctgcaacaacggcctcctgcccattgattgagtcattaatattgatgtcatgcccatcgattggtttagatggactttgttctttgcgttggctccctaatttaaccctgctggatttatcgtacacttttttggtcaatttgcagcctatttttgagtcttgttcacagctaaaggtattaaagttacaggcatgcaaatatctcactgactcatcacttgagcctctttacaaaggtgctttaccagtacttcaggagttggacttgtcttatggaacactgtgtcagtcggccatagaggagcttctttcttgctgcacacaccttacacgtgtgagcttgaatggctgtgccaatatgcatgatttaaactggggatgcagtcgtgcgcatactgctgaattgcctggtgtaaatgtcctacccattgcaagttcccctgaaaatgtcctcgagttaagtgagcaacccatccggttactgcagaacctaaactgtgtgggatgtccgaacattcggaaggttttcattccatcaacggcacattgttcccgtttgttatttttaaacctttctctatcagctaatttgaaggaagttgatgtagcttgtctcaacctaagctggcttaatctaagcaattgttcctctttggaagttttgaagctagagtgtccgagattgaccagtctattccttcagtcttgcaacattaatgaggaagctgttgaggctgctatatcaaaatgcactatgctggagactcttgatgttcgcttctgtccaaagataagctcaatgagcatgggaagattgcgtgcagcatgttctagtttgaagcgtatattcagcagcttgtcagcttcataa

SEQ ID NO: 246 - DNA, 1212 bp, Glycine Max
atgaaggcaattgatcttattcgtaaatggatggaggatgctggtttgagaacttgggtggaccaaatgggaaatgtacatggtcgagttgatggtgcaaatgaaaatgctgaagctttattgattggatctcacatggacactgttgttgatgctgggatgtttgatggatcactaggaattgtctctgcaatatctgccgtgaaggctatgcatgtcaatggaaagctgcaaaagctaaagcgccccgttgaggtgattgcatttagtgatgaagagggtgtcagatttcaaactactttcttgggaagtggtgctatagctggtattttacctggtacaacattggagatatctgataagagggaggtgatgattaaagattttctcaaggagaactcaatggacattacagaagaaagtcttttaaagctcaagtatgacccaaagtctgtttggggttatgttgaggttcacattgagcagggtcctgtgctagaacaagttggtttcccacttggtgtggttaaaggcatagctgggcagacacgattgaaggttacagttagaggttcacaaggtcatgctggaactgttccaatgtccatgcgccaggatcctatggctgctgctgcggaacaaattgtagtcttggaaagcctctgtaaacaccctgaagaatatctttcttatgatggtcattgcagtgattcaacagtgaaatcactgtcaagctcacttgtttgtactgttggggagatatcaacatggccaagtgccagtaatgtcattccaggccaggttacatataccgtggatatacgagcgatagatgaccttggacgtgaagctgttatctatgatttatcgaaacaaatttaccaaatatgtgacaagcgttcagtttcctgcattattgagcacaagcatgatgcaggtgctgtgatttgtgattcggatctaagttcacagctcaagtcagcagcttattctgcactcaagaagatggagggtgacattcaggatgaagtgccaacattaatgagcggagcagggcatgatgcaatggcaatatctcacttaacaaaggtgggaatgctgtttgtgcgttgtcgcggaggcataagtcactctccacaagagcatgtgctagataatgatgtctgggcagctggtttagcaaccttgtcatttctggaaaacctatcataa

SEQ ID NO: 247 - DNA, 1014 bp, Glycine Max
atgaatccttcctttccttcaaaatcctttatgtatgttgttcttatcttttgctttcttggtgccaccagattgtatgcaagtgacccttatctaacactggattactatgcatcaagttgccccaccgtgtttgacattgttaggaaagaaatggaatgtgcagtgctttctgatccccgcaatgcagccatgatagttcggctacacttccatgactgctttgttcagggctgcgatggatcagttttgcttgatgacacaatcacacttaaaggtgagaaaaacgccgctaccaacatccactctttaaaaggcttgggaattgttgataagatcaagaacatagttgaatcagagtgccctggaattgtttcttgcgctgatattctcactattgcagccagagatgctgttattctggtaggtggaccttactgggatgttcctgtgggaaggaaggattctgtcactgcaaattttgatcttgccaacaccaatcttgccactccagatgagagccttctgtctatcattgccaagtttctttaccaaggactatctgtcacggatatggtagcccttgcaggagcccacaccattggcatggcacagtgtaagaatttccggtcaagaatttacggagactttgaatcaacttcaatgaaaaatccaatctctgagagtcacctcagcaacttaaaatctgtttgtccacctatggggggaggagacaataacataacagcaatggactacatgacacctaatctctttgacaattctttctaccaattactactaaatggggagggacttctcaactcagaccaagaaatgtactcaagtgtgtttggaattgaaactagacagcttgtgaagaagtatgcagcagaccctcttgcttttttccgacaattctcggagtcaatggtgaaaatgggaaatatcacaaactcagaaagcttcttcacaggggaagttaggaagaactgcagatttgtgaacacatag

SEQ ID NO: 248 - DNA, 598 bp, Glycine Max
atgaatgctaaggtacatagctctgatgataccaagaaggatgaagaagttgtgcttcctggatttagattccatcccacagatgaagagcttgttgggttttatttgcagagaaaggtggacaagaagcctctaaaaattgaactcatcaaacaggttgatatctacaaatatgatccatgggatcttccaaaggtgaattcatttggggagaaagagtggtattttttctgcataagagggaggaagtacaggaacagcgtgaggccaaacagggtaactaggtcagggttctggaaggccacagggattgacaagtccatatattgcgtgaaagagccacatgaatgcattggcctcaagaagtcattggtctactatcgtggaagtgctggcaaaggcaccaaaactgattggatgatgcatgagtttcgccttccacccaatgcaaaatccaaccccaatgaccttcaagaagctgtaaatgttcatattcaagtcgctgaaagcttactagagtgtgttcaaattattctaaatataggtagcacgatcatacccgaattattggatatttggatacatgtcgtatacatac

SEQ ID NO: 249 - DNA, 945 bp, Glycine Max
atgaattcggacacgacttcctattggtgctacagctgcacgcgcttcgttcacatacaagaacagaacgacgtcgtttgcccgcgctgccacggcggcttcgtcgaaaaggtcaccgccccccaatcgtcaaggcaaggcttccgccgccgacgccgcaacgccgggaaccactcggcgttcaacccggtgatcgtgctccgcggaccgggagaggacgaggagagcagctttgagttatactacgacggcttcgacggcgaggggctccgcccgctgccatccaccatgtcggagttcttgcttggatcgggattcgaccggttgctggagcaggtttcgcagatcgagatcaacggcctcgggagggctgagaatccaccggcgtctaaggcggctatagagtcaatgccgacggtggaaatcaccgagtctcacgtcgcgtcggagacgatctgcgccgtgtgcaaggaagccttcgagcttggcgcgttggcgcgtgagatgccgtgtaagcatctctaccactccgattgcattctcccgtggctttcgatgcgaaactcgtgtccggtgtgccgccacgagttgccgtcggagcaaaccgcgccggaaacaagagtcgccggccagatcgaggaggaggctgtagggttgaccatatggaggttgccgggcgggggattcgccgtcgggaggttcgccggagagagccacttgccggtggtttacacggagatggagagtgacgggaactccaacgaaggttctagaagaatctctctggcggttggaagcggcagagttagggaaagtcgtggtggtggatttgggagaattttccgcaatttgtttgggagaattggggctttgactagaagccgtagcctttcaacttcactcttcaatagaagaagttctagagcctgggttttgggaaattga

SEQ ID NO: 250 - DNA, 1254 bp, Glycine Max
atgaatttcaagagctttggaaacgaggccggcggcggcggagggagacaggcggggaacttctcgctgacgcggcagccgtcggtgtactcgctgacgttcgacgagttcatgaacagcatgggaggttcggggaaggactttgggtccatgaacatggacgagttgctgaagaacatctggaccgcggaggaggttcagacaatggcgtcggcgggagtggccgccgatgacggcggcgccggcgtcagccatttgcagcggcaggggtcgctgacgttgccgcggaccctaagccagaagaccgttgatgaggtttggaaggacatttcgaaagaccacggtgggcccaacttggcccagacgcagagggagcccacgctgggagaggtgacgttggaggagtttttggtcagagctggtgttgttagagaagatgccaaaccaaacgaaagcgttttcgtagatctgtctcgcgttgggaataatagtggtttggggttggggtttcagcagaggaacaaggttgctgctgctaccggtttgatgggtaaccggttgaacaatgatccgctggtgggtcttcagccttctgctaacttgcctttgaatgttaatggggtgagaacatccaatcagcagccacagatgcagagtccacagtctcagcatcagcatcagcatcagcatcagcaacaacagcagcagatatttcctaaacagagtgctatgtcttatgcagctgctcagatgcctcagggaatggtgaggggtggggttgtggggcttggtgatcagggtttgagtgtgcaaggtggagggattggtatggttgggttggcacctgggtctgttcatgtagctactggctctcctgctgctaaccagctgtcctctggtgataggattgggaagagcaatggcgattcctcgtctgtgtcgccggttccttatgtctttaatggcagtctgcgaggaaggaagaacgggggagctgtggagaaggtgattgagaggaggcagagaaggatgataaagaatagagagtcagctgccaggtcgcgggctcgcaaacaggcttataccatggaattagaagcagaagttgctaagttaaaagaggagaaccaagaacttcagaaaaaacaggcagaaattatggaaattcagaaaaatcaagttaaggaaatgatgaatttgcaacgagaagtgaagagaagacgcctaagaagaacacaaactggtccgtggtag

SEQ ID NO: 251 - DNA, 1878 bp, Glycine Max
atgacactaactaacatggcgcacaataacatcaactccaccaccatggatggcgtgcctcaccgagtcaacagcccgcgttacaccggttcgatgactcgtcgagctcactcattcaaacgcaacaacaacagcaataatgaaattgagctccaaataaactcacccagatcacccttggtttctgctgaaggctctgttttgaaaaggaatcagcatcatcataaggagaaaaagaacaagtttggccattgggtgttcttgctcttttgtggggtatgcttgtttctgggtcttctcaagatttgtgcttctgcctggtggttcggatctaaagtacacagtacacacgaatccattattcaggaactatctgactccatcactagtcgaaatctaatggatcaaagctcccatggttatgcatatagggagggagcaaatgaggttgaacgaactctaaagatggtaactacaggggtaattgatagccaggctggcatggctgaagaatcaggtgtctggtctagacccaactatgacaatttcacccaatgtatagacctgccaagaaatcataaaaagctagatgaaaagaccaatggctacattctagtaaatgctaatggtggcctgaatcaaatgagatttgggatatgtgatatggttgctgttgctaagattatgaaggcaacacttgttcttccttctctcgatcacacctcttactggggtgatgcaagtggcttcaaggatttatttgactggaaacattttattgagacattgaaggatgatatccacgtagttgagacattaccacctgcctatgctgaaattgaacctttctcgaaaactccaatatcttggtctaaggccagttactacaagaatgaggttcttcccctgctaaagcagcataaagtgatctatttcacccataccaattccagacttgctaataatggaattccaagctccatacaaaagctaagatgtcgtgtaaattatagagcattgaaatattcagctccgattgaagaattcggaagcaaattaatatctagaatgcgacagaatgaaaatccttatctcgcgcttcatttgaggcaatctaaccgtaggattaaagcatacttagaagtagttttctggtggagtaagactgtaagagccccaattattaggctggtgtatgagaaggatatgcttgcatttactggctgcagtcacaatttgacagcagaagaagatgaagagctacgacagatgcggtatgaagttggtcactggaaggagaaggagattaatgggactgagaggagattgactggaggttgtccattaactcctagggaaacttccctattgcttagagcactaggttttccatcacaaaccaggatttatctggtagctggagaagcatatggtagaggaagtatgaaatatcttgaggatgctttccccaacattttctctcattcctctctgtcttctgaagaagagttgaatcctttcaagaatcaccagaacatgttagctggcatagactatattgttgcacttcagagtgatgtatttctctatacttatgatggaaatatggcaaaggcagtacaaggccataggcacttcgaaaacttcaagaagactatcaatccagacaaggtaaattttgttaaactcgttgataagttggatgaaggaaaaatttcttggaagaagttcagctccaaggtaaaaaggctgcatgaagatcgaatcggtgctccgtatcccagggagcggggagaatttcctaagctagaggaaagtttttatgcaaatcctctgccaggatgtatatgtgaaagaaaattagatacttcacagtag

SEQ ID NO: 252 - DNA, 1914 bp, Glycine Max
atgacggtggtcggactcttcctcactgccacgaagctcgccggagctctattcactctcaccgtcgccgccaacgccttctcctactcccgctttcgcaagaagaaccttcgcggtttccgctctcccatcgatgaatcccaagacactctcgcacactttaacgtcgctgaaggggaagatgggtttttctttggtttggcgacagcgccagcacatgttgaggacaggcttgatgatgcttggatccagtttgctgagaaaaagagtggtgaaggtggtggtgactctgaggggaagcagagagtggatgctgtgattggttctgcttctggcgatggtggttcccagccggccataacatctccgaggagcaggaagcctctcaaggtggcgatggaggccatgatcaggggaattgagaagtatatggaagtggaagggaaagaaagagaagaagaagcccgtcctaatgtaactgcttggcataatgttccatgcccggaggagaggttaaggttttggtctgatcctgaaacagaaataaagttggccaaggatactggtgttacagtttttcgcatgggaatagattggacaagaatcatgccagtggagccagtaagcagccttaatcaatctgttaactatgctgcattggaacggtataagtggattatcaatagggttcgatcgtatggaatgaaagtgatgctcactctttttcatcactcgcttccaccctgggctggtgagtatggaggttggaagctggaaaagacagtggattatttcatggactttaccaggcttgttgtagacagtgtctcagatttggtagactactgggtaacatttaatgagccccatgtcttctgtatgcttacttattgtgctggagcttggcctggtggtcatcctgatatgcttgaggctgctacttctgcacttccaactggtgttttccagcaggccatgcactggatgtctattgcacactcaaaggcatacgactacatccatggactaagtaacccattaaattcaatagtcggtgtagcacaccatgtgtcatttatgcgaccctatggtttgtttgatattgctgctgtttcactggctaattcattgactctcttcccatacattgatgaaatatctgagaagctggactatataggcataaactactatgggcaggaagtggtttcaggtgcaggcctgaagctggtggaaaatgatgagtacagtgaatctggtcgtggggtataccctgatggcttataccgcatgctgcttcaataccatgaaagatacaaacatctaaatattcccttcatcattactgaaaatggggtttcagatgagacagatttgattcgccggccatatctcttggagcatttgcttgctatttatgctgccatgatcatgggtgtgcgtgtacttggttacctgttctggactatttctgataactgggagtgggctgatggatatggtcccaagtttggacttgttgcggttgaccgggcaaataatcttgcacggacccctcgcccctcttaccatctattttctaagattgtgaatacaggcaaagttacacatgaagatcgtgaaagagcatgggatgaacttcaaagagttgcaaaagagaagaaaacaagaccattttatcgggctgtggataaacaccgtttaatgtatgcaggtggacttgacaaacctgaacagcgaccttatatagaacgagattggcggtttggtcattatcagatggatggactccaggatcccttgagccgcttctcaagatccatttttcgaccattctccctcttctcccttaaaaggaaaccaaaatctcaaaagaagaatgccaaattgattctccagcctcttgaaacttag

SEQ ID NO: 253 - DNA, 348 bp, Glycine Max
atgacgttgttgctggccctcaacctgagcgtggccttggcaagctcagaaaactcaccaccctcaaaactatgtttgattgttgatatagttgatgaaggagacagtagcaagctgcagaagacgttgtcgatgccgtcgacaccgacaatcccgatgactcccacgactccaacgacaccgggatccgcgcgtaaagctgacaacgtttggaggagcgtcttccatcctgggagcaactccgccacaaagaccatcggtgctcagatgtttgacaaaccacttcccaacactcccactgtctacgactggctgtacagtggggagaccagaagcaggcaccgctga

SEQ ID NO: 254 - DNA, 696 bp, Glycine Max
atgagtagagaattcagtgccctcgttctagcaggctcaagcatcgaaaacaacatcaccaccccaagtcaaatgagcttgaacacgatgcatggcaatgaagaaggtgttaatagttacactaacagcaacaacaattataataacaataacaatattaataataatagctacaacaacttggggaggattggagaggatgagatgttgatgatggaggagactaaccctttggcgattgtggcggacatcaaccctttggaggcggtttcgtcgtcgtcccctccgaggcgtggtggagggacttcttctggttcaggtggtgctcttaatgaggtgacagtgcagagagtgaggaaggaggaggttgaggcaaagatatcggcgtggcagaacgccaaggttgctaagatcaacaacaggttcaagagggaagatgctgttatcaatgggtgggagaatgagcaggttcagaaagcatcttcatggatgaagaaagttgagaggaagctggaagagaaaagagcaagagcactggagaaaatgcaaaatgatgtagcaaaagcccatagaaaagctgaggagaggagggcatcagcagaggctaaaaggggaactaaagtagccagggttctggagattgccaacctcatgagagcagttggaagagcacctactaaaagatctttcttttaa

SEQ ID NO: 255 - DNA, 1440 bp, Glycine Max
atgagtcagcctaagattaagcgccgagttggtaagtatgaggtggggaggaccattggtgaaggtacatttgcaaaggtgaaatttgcaaggaactctgagacgggagaccctgtggctcttaaaattcttgataaggagaaggtgctaaagcacaagatggctgagcagatcaggagagaagtagcaacaatgaaactaatcaagcatccaaatgttgttcgattgtgtgaggtcatgggaagcaagacaaaaatatatattgttttagagtttgtaaccgggggagagctctttgacaaaattgtaaaccatggaaggatgagtgaaaatgaagctcgtagatatttccagcagcttataaatgctgttgattattgccatagcaggggtgtttaccacagagacctgaagccagaaaatttgctattagatgcttatgggaaccttaaagtttctgattttggtttgagtgccctctcccagcaagttagggacgatggacttcttcatactacatgtggcactcctaattatgttgctcctgaggtccttaacgatagaggctatgatggggtaactgcagacttgtggtcatgtggggttattctctttgtattggttgcaggttacttgcctttcgatgaccctaatcttatgaacctgtataaaaaaatctcagttgctgaatttacttgccccccatggctttctttcagtgccaggaaattgattacatcttggatcctgatcccaccactgaccaagtttttggcctcatatcatctgcatcagcttgatttcatgattatgcaaatcaggataatgcgtatcactatacctgagatattggatgatgaatggtttaagaaagattataagcctccagtttttgaggagaacggggaaaccaacctcgatgatgttgaagctgtctttaaagattctgaagagcaccatgtgacagagaagaaagaagagcagcctacagccatgaatgcatttgagttaatttccatgtccaaaggactgaaccttgaaaacttgtttgatacagagcagggatttaaaagggaaacaagattcacctcaaaatcccctgcggatgagataatcaacaagattgaggaagctgcaaaacctcttggctttgatgtgcagaagaaaaattacaagatgaggcttgcaaatgtgaaagctggaaggaagggaaaccttaatgttgccacagagatattccaagtggcaccttctcttcacatggttgaggtacggaaggcaaaaggagatacattggagttccataaggtaaccttctgtccccttatttgtttaattgtgttactgcttgccacttcaaaaacaactcttctattgtcaattttaacaataattaaagaagcttattatatcagcagttgggtgggaataagagcataa

SEQ ID NO: 256 - DNA, 3120 bp, Glycine Max
atgagtcgccgtggcatggacgacgacgatgaggaggagtacgaggaggaggacgagcaggtcgccgacttcgacgaggaggaggaggaggacaaccaccgaggacgcgggggtggtggcggcaggaagaggagaagatctggattcattgacgacgacgccgaagaggtcgatgaggacgaggacgaggaggacgacgatgacgaggatttcgatggacggggtggtggtggcggtcggaggcgccagtacaagaaggtttccgcttctaatttcttcgacgaagaggccgtggtggatagtgatgaggaagaggaagaagaggagggagaagacgacttcatcgttgaaggtggagcggatctgccagaagaagatgatgggagaaagatgcgtagtagccgtatgctgccacaccaccaagaggatcatgaagatcttgaagctatggccagaagcatccaggaacgatatggaaggcgcctaacagattatgatgaagaaacaacagacgtagagcaacaagcccttttgccatctgtgagagatccaaagctgtggatggtcaaatgtgcaattggtcgtgagagggaaacagctgtttgcctcatgcaaaagtacatagataaggggtctgaattgcaaatcagatcagctattgctctcgatcatctcaaaaactatatatacgtggaagcagataaagaagcccatgtcagagaggcttgcaaaggtctacgcaatatatttggccaaaaaataacacttgttccaatcagagaaatgactgatgttttgtcagttgaaagcaaagctattgatcttgctagagatacttgggtcagaatgaaaattgggacttataaaggggaccttgccaaagtagtggatgttgataatgtgcggcagagggttactgtcaaattaattccaaggatagacttacaggctcttgcaaacaaattggaaggtagagaagttgtgaaaaaaaaggcttttgttcctcctcctcgttttatgaatgttgatgaagcaagggaactgcatatccgtgtggagcatagacgcgatgcctatggggaacgatttgatgcaattggaggcatgatgttcaaagatggattcttatataaaactgtatcaataaaatccattagtgctcagaacatcaaacctacttttgatgagcttgaaaaatttcgtaaaccgggtgagagtggagacggggacgtagctagtctatcaactttgtttgcaaacaggaagaaaggccattttatgaaaggtgatgctgtaattgttataaagggagatttaaagaacttgaaggggaaggtagagaaagttgatgaagataatgttcatataagaccagaaatggaggatcttccaaaaactattgctgtaaatgaaaaggaactttgtaaatattttgaaccaggaaaccacgttaaggttgtttctggtgctcaagagggggctacgggcatggttgtgaaggtggagcagcatgtgttgatcttaatatctgatacaacaaaagagcatatccgtgtatttgcagatgatgttgtagaaagttcagaagtaactactggagttacaagaattggggactatgaacttcgcgatcttgtattgctagataataatagctttggtgtgataatacgtgtagaaagtgaggcatttcaggttcttaaggggattcctgacagacctgaagttgtgcttattaaattaagagagatcaaatgcaagatagataagaaaataagtgtgcaggataggtttaagaatacagtatcgtcaaaggatgttgtgcggatcgttgatggtccctgcaaaggaaaacaaggtcctgtggagcacatatataggggaatcttgttcatctttgatcgccatcatcttgaacacgcaggctttatatgtgctaaggcccaatcgtgtgtagttgtgggaggttcacgctccagtggtgaaagaaatggtgatgcctactcaagatttgccagtcttagaagtccaagtcgtattccaccgtccccaaggaggttttctcgaggagggccaatggattctggagggagacataggggtggaaggggccatgatagtttggccgggacaaccgttaaagtacgccagggtccctataaaggttaccgtgggcgtgttatagatgttaaaggcacaacagttcgtgttgagttggaatcccaaatgaaggttgtgacagttgaccgcaaccatatatctgacaatgtggctgtaaccccatatcgtgatacatctcgctatggaatgggaagtgaaacaccaatgcatccttctcgaactcccttacatccatatatgactccaatgagagatcctggagcaacacctattcatgatggaatgagaacacctatgcatagccgagcatggaatccttatactccaatgagtcctccaagggataactgggaagatggaaatccaggctcttggggagccagtccacagtatcagcctggaagccctccttcacggccatatgaagccccaactcctggtgctggttgggctagcactcccggtggaaattatagtgaagctggaacaccgcgggacagttctgcctatgccaatgctccaagcccatatttaccatcaacacctggtggacagcctatgacaccaagttcagcatcttatcttcctggcacccctggaggacagcctatgactccaggcacaggtggtatggacatgatgtctccagttttaggtggggaaaacgaagggccatggtttatcccagatatattggtcaacgtacacagggctggagaggaatctattggagttataagagaggctctcccggatggctcttacagggtaggtcttggatcaagtggtaatggtgaaacgattacagcccttcctaatgaaatggaggctgtggtaccaagaaaatcagacaaaataaagattatgggtggggcattgcgtggtgcaaccggcaagttgattggtgtagatggtacggatggaattgtaaaggtagatgacacattggatgtgaagattttagacttagttattttggcaaaattggctcaaccatga

SEQ ID NO: 257 - DNA, 1854 bp, Glycine Max
atgagtttgaagcttcccagttatggaaagctaaatcctctgttggatcttccttgtagggctagtttgtcgtactatcacgagggattggggattaggctagactaccatgaggaatcagggtttagaatttcaggagacaccatagaacgcataagcattgttaaatctcccactgaaaatttagttcctctagacttagaaattgaagctacattgagaaggaacagggccgagaggagaaggaaacttctgcaagacagaacaattgcattcattcttgaggaagaaactcatttttctgatttattatcacctgattcaccatcatcaagggaatccgctactcaatttcctgaaaccactatcatggtagacgagcaacaccagaggatcacccttgaggattattcaagcagctcagtaccacaattctttactagcattgcatgattacctaatgaagacccctatggacatttggcaatattcattgaaatatgcaacactgttaagattgccgatgtgccagatgaagctattagactcagcctattctcattctcattggcaggaaaggccaagaggtggcttcactcatttaaagagtccaagactacggaaaggaaagctacaatctcttcatttcatcagttccctgatgaatctctgagtgaagcattggagaggccaatccaacaagggcctaacatctttcagaggactactaagttggaggagactttgactcagtttatgcaaatagctgacaagtcatccaacaattttgtggcaagtacagaaaagaatctgaaggaggaatgcaaagttgtgatgacaaggagtaagaggtttgtggaggctgaggatgaggagagtgttatccctccacccaagcataaagaccctgggagtgtaactattccttgttcaattggagaagtcactgtgggaaagactcttattgacctaggagccagcattaatttaatgccactctccatgtccagaagagtgaaacattttatcttcccggcagactttatggtaatggatatctatgaagatactgacattccggtaatattgggaaggtcattcatgttaactacaaactacatagttgatatgggtagaaagaagctggagatgggttttgaagatcagaaaattgattttaatttgtttgttgaagacaagcctgctccagaacaaaatgtttgcttacaggtaatggaagtgggtcaagaggttctggagcggaagcctcgcgctaagcgcatctttggtcatgtgctaagccgcgagtctcaagcgcttagcgctcaacccttgcaacttaggatgatttggtccgctaagctggccaagctcatttccttgcggccagaactagggttcatggagctaagcgccagtcatggcggcatccgttgggctaagcgagccccgctcactaagctcccatacttaatgtattttgtgaactgtatggtgccgctaagcgcaacctatgaggagttgagtgcatatccttgcggcagacctcaacttccgttggtgagaccaaatgaggctgctcctcctaagcttgcaccggcacgggttgaaccaatgccagctgagccacgatctctagtggtgaatccacctccttctcctgagcttgaagtagttcccccatctccacctcttattatcatctccgatgcatcatcagatgaaactattgcccctcctgattcaccagctggggaaacagctgatccccctaattcctcagttggaggaattgcctatctttctgattcatcatctggagaagttgttgctctcactgattccccagtttag

SEQ ID NO: 258 - DNA, 225 bp, Glycine Max
atgatacatcacatggtagaagggcagtacagtgagaaagttgccacagttttgcccatcagcgcgatggtaattgtttttgagacttccaggaattccagctggaatttgcttatcagctggtgctggtgctggtgctggtgcaggtgctggtgctgctgctgctgcaggtgcaggtgctgctgctgctgctggtgctggactttgcttatcaaccggtggtga

SEQ ID NO: 259 - DNA, 543 bp, Glycine Max
atgatacccccgatgctgggactagcatccaccagagtggctttgccacttgatcttgcagaagatggaccaatttatgtcaatgcaaaacaataccatggtatactgagaaggcgtcagtcacgagcaaaacttgaggctcagaacaaacttatcaaaaatcgtaagccatatcttcacgagtctcggcaccgccatgctttgaatagggttaggggatccggggggcgatttctcagcaccaaacagcttgcacagtctaatgcagaatttgtcactggtgcacattctggttctgaccctaccaacagatatcaaaaggaacatctatcagaggtggaaagtcattcctcaaaagatggagataattcatctttcatcacaacctgctccgaccggccatgtttatctggcaacaatgtcaattttcggcagcaggagtgcatgtttctggggaattctgcaaacatgggtggatcaccacagttcagtgggggactcacctttggcggagcaaagcagcgcacatcagttgtccggtga

SEQ ID NO: 260 - DNA, 2475 bp, Glycine Max
atgatcagcaagcttattccaaacttaagagagttgaggctagttggttgttctctttcagatacaaatattcaatctctgttttattcaccttccaacttttccactgctcttaccatccttgatctttattcaaataagctcacatcctcaacatttcaactgttgtcaaactttagccttaatcttcaggagctttatcttggtcataataacattgttttgtcatctcctctctgcccaaactttccggctcttgttatccttgacctttcctataataatatgacatcatcagtctttcaaggtagtttcaacttcagctcaaaacttcaaaatctttatttgtataattgtagtcttacggatggaagttttcttatgtcatcttctttcattatgagttcttcatcttctcttgtatcccttgatctctcctcaaatcagttgaaatcatcaactatattttactggctctttaactccaccaccaatcttcataaccttgaccttggttataacatgttagaaggtcccattccagatggatttgggaaagtaatgaactctcttgaagttcttcacttctccggtaacaaactgcaaggagagattccaactttctttgggaacatgtgcgcattgcagagtttatccctctcatataacaagttgaatggggaaatttctagcttctttcaaaattcttcatggtgcaaccgaaacatatttaagagcttggatttatctaataaccagattactggcatgttacctaaaagcattggttttctatcagagttggaggatcttaacttggctgggaattctttggagggtgatgtcactgaatcccatctttctaatttttccaaattaaaatacttgttcttatcagagagctcgttgtctctgaaatttgtcccgagttgggttcctccattccaattagaatcattggaaatcagatcttgcaagttgggccccacttttcctagttggctcaagactcaaagttctttgtatatgcttgatatttctgataacgggattaatgactctgtaccagactggttttggaataagttgcaaaatatgggattgttaaatatgtcttccaattatctcattggtgcaattcctaatatatcgttgaagcttcctctcagaccgtctatacttctgaattcaaatcagtttgagggtaaaattccgtcatttttactacaagcttccgagctgatgctctctgaaaataatttttcagatttgttttcattcttatgtgaccaaagcacagcttcaaatttggccactttagatgtgtcacgcaatcaaataaatgggcaactgccagattgttggaaatcagtaaagcaattactgttccttgatttaagcagcaataaattgtcagggaagattcctatgtccatgggcgcccttgttaatatggaagccttggttttacgaaacaatggtttaatgggtgagttgccttcttctttgaagaattgcagcagtttatttatgctggacctgagtgaaaatatgttgtcgggtccaataccatcatggattggagaaagtatgcatcaattgataatcttgaacatgcgaggaaatcacctctccggaaatctacccattcatctctgttatttgaaccgtattcaattgttggatctttcaaggaataatttgtcaagaggaattccatcatgcttaaagaatttcactgcaatgtctgaacagagcatcaactcaagtgacactatgtctcgtatatattggtataataacacttactatgaaatttatggtagttactcattggaaggttatacacttgacataacatggatgtggaaaggtgtggaacaggggttcaagaatccagagttaaagctcaagagcattgatctttccagtaaccatttaaccggtgaaataccaaaggaggtcggatatttgcttgggttagtttctttgaatctatcaagaaacaatttgagtggagaaattccttctcggattgggaatttaaggtcactagaatcacttgacttgtcaagaaatcacatctctgggagaattccttcttctctttctgaaattgattatttgcaaaaattagacttgtcacacaactctctttctggaagaatcccatcaggaagacattttgaaacctttgaagcctctagttttgaaggaaacattgatctttgtggtgaacaacttaacaaaacttgtcctggggatgaagatcagacaacagaagagcatcaagaaccaccagtcaaaggtgatgattcagttttctatgagggattatacatcagcttggggattggatacttcactggattttggggcttattagggccattactactgtggcgtccttggagaattgcttacatcaggtttctgaacagattaacagactatgtatatgtatgtttattgtga

SEQ ID NO: 261 - DNA, 900 bp, Glycine Max
atgatctcagaaatagagcatgaaaatttggttcagctatatggttgttgtgtggaagggaatcaacggattttggtctacaattatcttgagaacaatagccttgaacaaacccttctgggttcaggtcacagtaatatcatttttgattggaaaacacgatctaggatttgcattgggattgcacgtgggcttgcttatcttcatgaagaagtaagaccacatattgttcacagagatataaaagcaagcaatattctccttgacaaaaaccttacacccaaaatttcagattttggtcttgcaaagcttattccatcatacatgactcatgtcagcacacgtgtggtgggaacaataggttatttggctccagagtatgcaataagagggcagctgacacgcaaagcagatatttacagctttggtgtcctccttgtggagatagttagtggaagatgtcacacaaatacacgattaccaataggagagcaatatcttttagaaacgacatgggaactttatcagaaaagagaattggtagggctggtagacatgtcactagacggccatttcgatgtcgaggaggcatgtaagtttctgaaaattggacttctttgcactcaggacacgtcgaagctccggccaaccatgtcatctgtggtgaagatgctcactggagaaaacgatattgatgaaagtaagataacaaagccaagctttatttcagattttatgaatcttaaaatcagaggagaaaaaggtggtgatattgataccaaggtttcatcttcctacaatgcatcctctgcctcagacagccacagcaataccatgtcatatgctgcaagtacaactacaaccacaaccttcaccgggaaatatgatcaaagtttgtaa

SEQ ID NO: 262 - DNA, 987 bp, Glycine Max
atgatgccaggcaatggacagttaacagttcctccgggcttcaggttccaccctactgatgaggagcttctctactattacctgaggaagaaagtttcttatgaagccattgatcttgatgtcataagagaagtagatctcaacaaacttgagccttgggacctcaatgataagtgtaggattgggtcagggcctcagaatgagtggtatttcttcagccacaaggacaagaagtacccaacaggaaccagaacaaaccgagcaactacagctgggttttggaaagcaactgggagggacaaggccatataccacactaattccaagaggattggcatgaggaaaaccctagttttctacactggtcgtgctcctcatggccaaaagactgattggatcatgcatgagtatcgccttgatgaagatgatgctgatattcaagaagatgggtgggtggtatgcagggtgttcaaaaagaaaagccaaaaccgaggtttccagcaagaaattgaagaagaagagcacttaaccacccatatgagagcaagtggtcattgccaggtcctagagccaaagcatcatcacatgcaacaaggactctatgatcactacaacttcgatgggacaatgcatctcccacagttgttcagtcaagaatcagcagttgcaccacccacaaattcttccttggcctcatctatgaatgccatggacatccttcagtgctctcaaaacctcctgaggctcacaaccactactggctgtggacttaatctcatgcagcagcaacaacaacaaggagagaggttcagtggtgactggtctttcttggacaagctactagcatcacaccatggcatggatcaaagcaaatgtaaccctcctactcatcatcaaggtgcaagtgtgggaacttcagctcagaaattcccatttcattaccttggctgtgacaccacccatgatatcatgaaattttccaagtag

SEQ ID NO: 263 - DNA, 1053 bp, Glycine Max
atgatgctcggagaacaccatcgcgggaatccgacggtcctcgtgccaccgtggccagcccacgacgatccgacggctgagatgtactccgcgttcttaacaaacgacgtcaatgctggtgagtactctccgtaccatcttcaagaagcactaacggcgctgcagcgttttctgccgtcaaacgaaacggacgcagactcggactcctcggaggcggctcagcccgacgcggcggtggacgcgtacacgtgcgaccatttccgcatgtacgagttcaaggtccgtcgatgcgcacgtggcaggtcacacgactggacggagtgtccgtacgcgcatcccggcgagaaggcccgccgccgtgacccgcggaggttccactactctggcgtggcgtgcccggagttccgcaagggaaactgcaggaaaggcgacgcgtgcgagttcgcgcacggcgttttcgagtgctggctccatccggcgcgctaccggactcagccatgcaaggacggcacgagctgccggcggcgcgtgtgcttcttcgcgcacacgccggagcagctgcgcgtcctgccgatgcagagtccgcgtagcgtggcaaactcatcggagtcctacgacgggtctccgatgaggcaggtttcgttgtcgtcggcggcggcggcggcgttcatgtcttctccggcggcttctctctctccgccagagtcgccgccatcggtgaacgagatggtggcttctctgcgtaatttgcagcttgggaaaatgaaatcgatgcctcataatagaaacgtgtcggtcgggtcgccgaggggatcggtactccgaccgggttttttaagccttccaacaacgccaactcagcaaccggttcggtctggggtgaagtgttttgatgtttgggatgagagttttgaggaggaaccggttatggagagggtggagtcagggaggggaataagggctaagatgtttgagaagctcagcaaggagaattcactcgacgcctcggcttcgcctccggatcttgggtgggtctcggagcttgttaagtga

SEQ ID NO: 264 - DNA, 1317 bp, Glycine Max
atgatggaagagagaaataatgatgctgagaaacttgatgaagttatgctaccggggttcaggtttcatccaactgatgaggagcttgtagggttttacctcaagagaaagattcagcaacgccctttgactattgagctcatcaagcagcttgatatctacaaatttgacccttgggatcttccaaagttggccaccacaggagagaaagagtggtatttttactgtccaagggacagaaaatacagaaacagtgcaaggcctaatagggtaactggagctgggttctggaaagcaactgggactgataggcctatctactcctcagaaggttccaagtgcattggcctgaagaaatccctagtcttttacaaaggtagagctgccaaaggagtcaaaactgattggatgatgcatgagttcaggctaccttctctcactgactcactctccccaaagtacatagacaagaccattcctgctaatgaatcttgggctatctgcaggatattcaagaaaatcaatgctacagctcaaagaactttatctcaatcttgggcctcttccctacctcctgatacaagaacctctgatcatcatatccaaaccaaagatcaagacagcactactcagttttgttcagacaacatgccaatgacaaataaaactaccttaaccagccagttctgtaataacaattacaatgattcacaacccttacccactaatagtagtagtagtcctctttgtcccttagatgttgcctcatacaaatccatcattaacccattgctttacaaagcctttgatcattttcccatttctaatgaagaccttagaactagcttgctattctcacccccctttgaaacatcagatgctaatcccaaatctacaatggtcgacgtttcttccatgttgttgagcttgccatcctcagtgcttggagattttaacaagactacttcagaagacacaaatacagcttcaaactttggtgtattgcaagagcactgtagtggctacccaataccatttctacctgagatgcaaaccacatttggtaaccaacaacaacaatattgtgataatattaatgcattggtaaagggtcctaatgtgaatgtgcctcgtgttgatgaccaagagttggagttggagacagtagtacaacgatccattgggtttccattaagtgctactatgcctttgaatattgtcgatgcatggaagtcaaataatctgctttgggatacttcctcttttccttgtgatatgccatctagttattattccacaactaagtgttatacttag

SEQ ID NO: 265 - DNA, 2133 bp, Glycine Max
atgatttccgtaccccttctcttagtccccactcccctcaagctctccctctgtcgcactccattttggttaaaccaaaaagtccttcaagctccttcgacattgactagtcaaaacccgaaaccgagacagagtgatagaacagagaaagaaaaaataactacttcaaccaaattagacactgcaccagaaatggaggctccaccaggtggatccggatccggatccggacccgagcgagataaatccaccgctccctcctcttctccgatctccgtcgtctccgccttctggaaagattttgagttggagaaggagaaatctatattggatgagcaagggcttcgaattgcagagaaccaggaaaacagtcagagaaatcggcgcaagcttgcagagaacactagagacttcaaaaaggcttcgcctgaggataagttaagtttgttcaattccttgcttaagggctatcaagaagaggttgataatcttactaagagagcaaagtttggagaaaatgcttttctcaacatctatcaaaagctctatgaagctccggatccttatccagctcttgtgtcgattgctgagcaagatctcaagatatctgagcttgaatctgaaaaccggaaaatgaaagttgagcttgaggagttcaggacagaggcaactcacttgaagaatcagcaggctacaatacgaagacttgaagagagaaacaggcaattagagcaacagatggaagagaaagtgaaagaaattgtggagattaagcaacgcagtctggcagaagagaatcagaaaacaatggaagttttgaaagaaagaaagaagggagggaaacataggatggagaacccatgtgagccaaagaaatactggctccaagcactacctgcacacatggcagggtgggaacaggcactgcaagatcagttgcagcatgccaaagacagtgtttctactatgcagaaattgcatgaactcgcacaaaaccagttgtttgaactccgcgcccaatctgaggaagagagggcatctaagcaatcagaggtcaatcttctgatggatgaagtggaacgtgcacaatcaatgcttcttagtttagaaagagagaagggggttctccgaaatcagttgcaaacggcaaatgaagagactgaaactaagaatagtgataattttgactcaaatagcgcgctggagaattctttaaatgccaaagaaaaacaaatctctgatttgaacatggaactacacaatattgaaacagccttatcaaatgaaagagatcaacacattaatgaagtcaagaaacttacggccatgctcaatgaaaaggaggctgcccttgaggagatgaagaaagaacttaaagcaaggccaacagaaaagatggttgatgatctgcgcaagaaagtgaaaattttgcaggcagtgggttataattcaatcgaggccgaagactgggaagtggctacaagtggagaagagatgagcaagatggagtctcttcttcttgataagaaccgtaaaatggaacatgaactaacacagttgaaggtcacgctttctgagaaaacgtccatactggaaacagctgaacagaagatagcagaacttacagcaaagtctaatgaacaacagaaattgatacagaagttggaagatgatatattgaagggatatagttccaattcaaaagaccgtaaagggaacttccttgatgattgggatctttcagaagctggtgggggtgaggtttctgagaatactgaccaaaggcaagtatccttagaccaagatcagagctcaatgcttaaagtgatttgcaatcaaagagatcgatttaggacccgcttgcgagagacagaagaggaaataaggcagttgaaggagaagattggggtattaacagtggaactggaaaagagcaaagttgataatgtcaaactatacgggaagattcgttatgtacaagactataatcatgagaaagtggtttctaggggttctaaaaagtatgctgaagatcttgaaagtggtttcatgtcagatgtggaatctaaatacaagaagatatatgaggatgatataaatccttttgctgcattctcaaaaaaggtgacttaa

SEQ ID NO: 266 - DNA, 924 bp, Glycine Max
atgcaatctaaatctgaaactgcaaatcaactgaggtctgatccacattcctttacacctaacaatgcttattctgaaccctggtggcgaggtattcagtacaatcctgtcccccaagcaatgttaggagtgaatgcatctaattcatcttcacttgaacgccctaatggtgattcggaatccagtgaagaggatgatgatgccactaaagaatcacaacccactgctcctaatcaatcaggaaattatggacaggaccaccaagcgatgcaacattcttcatcatctgcacctttggtacgtgatgattgccttacacaggctccacaagtggaacttgttggccactcaattggatacactccttttataggaatgccccatgccagaatggctttgccccttgagatggctcaagagcctgtttatgtgaatgccaaacaataccaaggaattctgagacgaagacaggctcgtgctaaagcagagcttgaaaagaaattaataaaagtcagaaagccatatcttcatgaatcccggcatcagcatgctataagaagagcacgaggtaatggagggcgttttgcaaagaaaactgaagttgaggcttcaaaccacatgaacaaggaaaaggatatgggtactggccaggtcccattgtcacggtcaattagttcatctggttttggatcactaccctctgactctgctgagacctggaattctcctagtgtgcaacaagatgcaagaggatctcaagtgcatgagagatttgaagaacgcaactatgcaaatgttttgcagtcatcatctactttttgtttgcactcgggtgaaagagtggaggaaggggactgttcaggtcaacaacggggaagcatcttgtcagagcacacctcacagaggcgtcttgctattcagtaa

SEQ ID NO: 267 - DNA, 1197 bp, Glycine Max
atgcactatcttgctttcaatccaagttcactttggtggcagttgaacgagtttgcaaccccacacacaaaaaccaaacccttaaaaatgtcatccccctcgccggtggccacggtggtctccgccgccgcgctgtacgaccgcgccaaagccgtgaaagaattcgacgaaaccaaggtcggagtcaaaggtttgatcgattcgggaatcagaaccatcccccctttcttcgtccacccgcccgaaaccctagcggacctcaagcgcggaaccaaacccgggtccgcgccggagatccccacggtggacctcgccgccgaggagagctcccgcgccgccgtggtggagcaggtccggcgggcggcgagcaccgtgggattcttccaggtggtcaaccacggcgtcccggaggagctgctattgcgaacgctggcggcggtgaaggcgttccacgagcagcccgcggaggagagggcgcgggtgtaccgtagggagatggggaagggtgtgtcgtatatttccaacgtggatctcttccaatcaaaagccgccagctggcgcgacaccatccagattaggatggggccaaccgcagtggattcgagcgagattccagaagtgtgtaggaaagaggtaatggagtgggacaaggaggtggcgcgtgtggctcgtgtgttatacggtttactgagtgaagggctgggattgggtacggagaggctcacggagatgggtttggtggaagggagggttatggtggggcactattacccgttttgtcctcaacctgatctaacggtggggcttaactcgcatgcggatccaggggctcttacggtgttgctgcaggaccatattggggggttgcaggttgagactgaacagggttggatccatgtcaagcctcagcctaacgccttggttattaacattggagatttccttcagataatttctaatgaaacatacaagagtgctcatcatcgggtgttagccaattattctaacgagccacgagtctctattgccgttttcctcaacccaagtgatagggagaaacattttggaccattaccagagctaacatcaacagagaaaccagctctttataggaacttcacgttccatgaatttatgacaaggttcttcacgaaagagttggacggtaaatcattgacaaatttcttcaggcagtga

SEQ ID NO: 268 - DNA, 495 bp, Glycine Max
atgcagagtgagaaccagaacaaccagctggtagtgcagaattcggggagcctgagcttcagcagccatttgtcgaaggaagatgaagagatttcacggtctgctctctccaccttcagggcaaaggaggaagagattgaaaggaagaagatggaggtcagagaaaaggttcagcttcagcttggtcgtgtcgaagaagaaactaagcgtcttgcaaccattcgtgaggagcttgaagccctggcagatccaatgaggaaagaagttgcgcttgttcgaaaaagaattgattccgtaaacaaagaattaaagccactgggtcatacttgccagaagaaggagaaagaatacaaagacgcccttgaagcttttaatgaaaagaacagggaaaaagtacagctaatcaccaagttaatggagttggtgagtgaaagtgaaagattgaggatgaagaagctggaggagctgagtaagaacatagattcgatacaatga

SEQ ID NO: 269 - DNA, 1002 bp, Glycine Max
atgccaactgacacatcatcagtttccggcggcgaaatcgtgtgtgtgaccggtgccggcggtttcatagcctcttggcttgtcaaacatctcttagagaaaggctacactgtgagaggaaccgtgagaaacccagatgatccgaagaatggtcatttgaaagagttggaaggaggcaaggagaggctaactctgcataaagttgatctcttcgatattgactccattaaagaagctcttaacggttgccacggtgtcttccacaccgcttctccagtcaccgacaaccctgaagagatggtagagccagcagtgaatggaacgaagaatgtgatcacagcagcagcagaagcaaaagtgcgacgggtggtgttcacttcgtcaattggcacagtctacatggaccccaatacgagtagggatgcgttggtcgatgaatcattctggagtgatttggagtactgcaagaacaccaagaattggtattgctatggaaagacggtggcagaacaaacagcatgggatgtagcaaaagagagaggggtggacttggttgtggtgaacccagttttggttattggaccgttgttgcaaccaaccattaatgctagtacaattcacatcctaaagtaccttactggctctgccaagacttatgtaaatgcaactcaggcttacatacatgtgagggatgtggcattagcccacattcttgtttatgagacaccttcagcttctggtcgatacatatgtgccgaaagttcgctgcatcgtggtgagcttgttgaaattttggccaagttttttcccgagtacccaattcctaccaaatgttcagatgaaaagaatccgagagtaaaaccctacatattttcaaatcaaaagctgaaagatttgggattggaattcacccctgtgaagcagtgtctatatgacaccgttaaaaatcttcaagagaacggccaccttcctgtccccccaaaacaagaagactcctattga

SEQ ID NO: 270 - DNA, 999 bp, Glycine Max
atgccaactgacacgtcatcagtttccggcgaaatcgtgtgtgtgaccggtgccggcggtttcatagcctcttggcttgtcaaacttctcttagagaaaggctacactgtgagaggaaccgtgagaaatccagatgatccgaagaatggtcatttgaaagagttggaaggaggcaaggagaggctaactctgcataaagttgatctcttcgatattgcctccattaaagcagctcttcacggttgccacggtgtcttccacaccgcttctccggtcaccgacaaccctgaagagatggtggagccagcagtgaaaggaacgaagaatgtgatcatagcagcagcagaagcaaaagtgcgacgcgtggtgttcacttcttcaattggcaccgtctatatggaccccaatacgagtagggatgcgttggttgatgaatcattctggagtgacttggagtactgtaaaaacaccaagaattggtattgctacgggaagacggtggctgaacaagcagcatgggatgtagcaaaagagagaggggtggacttggttgtggtgaacccagttttggtgattggaccattgttgcaaccaaccattaatgctagtacaattcacatcctaaagtaccttactggctctgccaaaacttatgtaaatgccactcaggcttacgtacatgtgagggatgtggcattagcccacattcttgtttatgagacaccttcagcttctggtcgattcatatgtgctgaaagctcgctgcatcgtggtgagctagttgaaattttggccaagtttttccccgagtacccaattcctaccaaatgttcagatgaaaagaacccgagagtaaaaccctacatattttcaaatcaaaagctgaaagatttgggattggaattcaccccagtgaagcagtgtctatatgacaccgttaaaaatctgcaagagaatggccaccttcctgtccccccaaagcaaaaagattcctattga

SEQ ID NO: 271 - DNA, 999 bp, Glycine Max; identical to SEQ ID NO: 270

SEQ ID NO: 272 - DNA, 879 bp, Glycine Max
atgccagggaaacctgacactgatgattggcgtgtagagcgtggggagcagattcagtttcagtcttccatttactctcatcatcagccttggtggcgcggagtgggggaaaatgcctccaaatcatcttcagatgatcagttaaatggttcaatcgtgaatggcggaggtgttgccaaagaataccaaaacatcaaacatgccatgttgtcaaccccatttaccatggagaaacatcttgctccaaatccccagatggaacttgttggtcattcagttgttttaacatctccttattcagatgcacagtatggtcaaatcttgactacttacgggcaacaagttatgataaatcctcagttgtatggaatgcatcatgctagaatgcctttgccacttgaaatggaagaggagcctgtttatgtcaatgcgaagcagtatcatggtattttgaggcgaagacagtcacgtgctaaggctgagattgaaaagaaagtaatcaaaaacaggaagccatacctccatgaatcccgtcaccttcatgcaatgagaagggcaagaggcaacggtggtcgctttctcaacacaaagaagcttgaaaataacaattctaattccacttcagacaaaggcaacaatactcgtgcaaacgcctcaacaaactcgcctaacactcaacttttgttcaccaacaatttgaatctaggctcatcaaatgtttcacaagccacagttcagcacatgcacacagagcagagtttcactataggttaccataatggaaatggtcttacagcactataccgttcacaagcaaatgggaaaaaggagggaaactgctttggtaaagagagggaccctaatggggatttcaaataa

SEQ ID NO: 273 - DNA, 328 bp, Glycine Max
atgcccaccccaaaaagcctcgttctttcgctcctcctccttctgggcctctgttccggcgacggcggcggtggcgctccgccgcaggagctgtggtgcgtggcgaagaacaacgcggaggacgcggcgctgcaggccgcgctggactgggcctgcggggccggcggcgccgactgccgcccaatccagcgcggtgggccctgctacgaccccaccagcgtccagaatacggcgtcgtttgccttcaacgactattttctgaaacatggcatgaccgacgatagctgcgacttcaacaacaacgctgccgtcacttccttgaacccta

SEQ ID NO: 274 - DNA, 1260 bp, Glycine Max
atgccggaaaacatgagcatatcagtgaatggacaatctcaagtccctcctggcttcaggtttcatccaactgaagaggagcttcttcagtactacttgaggaagaaggtctcctatgagaagattgaccttgacgtgattcgtgacgttgatctcaacaagctcgagccatgggacatacaagagaaatgcaaaataggaaccactccgcagaatgattggtacttcttcagccacaaagacaagaagtaccccacaggaacgcgcaccaatcgcgccactgctgcagggttctggaaggccactggccgtgacaaagtcatatacagcaacggcaagaggattggaatgagaaagactctggttttctacaaaggaagagccccacatggccagaaatccgattggatcatgcatgaatacagactagacgacaacaacaccgctgacaccaatattgtgtccaatgtgatgggggatgctgctcaggaagaagggtgggtggtgtgtaggatattcaagaagaagaaccatctgaaaaccctagacagccccttggcttcaggggaagatagaaggagccacttgttcgactcgtgcgacgagggagctttggagcaaatacttgagcaaatgggaaggagttgcaaggaagagagcagctatgaaggcaactacagaaactatggaaggtttacaaggccttatgagacaacagggttgaacaatggcggcggatacaatgataggttcatgaagctcccgagcctcgagagcccgaaatccgcgagcatggagagccaccacaacaccaacaacaacaataacatgaatagtaataataataataatggtgataacaacgagaacaacaataataatgggtaccatcccatgattccagtagagatgggcacagacaacgaagggtcattcacaacgcaccaggtgagtggtggtgaccccaacaacaacaacaacaacatggttcatccattggaggtaggatcaggtggtggaggcctcaccaactgggctgcgctggaccgtctagttgcatctcaactcaatggccaaaccgatgcctctaggcaactcgcgtgtgcattcaacgaccccaccatgtattgcaccacattcatcaaccccaccacacaggacttcaccagcgagattgacctttggaacttcacccgatccacgtcctcactgttggcatcctccgaaccactgtgccacgtgtccaacacgtcagtgtag

SEQ ID NO: 275 - DNA, 1167 bp, Glycine Max
atgccggaaaacatgagcatatcagtgaatggtcaatctcaagtccctcctggcttcaggtttcatccaactgaagaagagcttcttcagtactacttgaggaagaaggtctcttacgagaagattgacctcgacgtgattcgtgacgttgatctcaacaagctcgagccatgggacatacaagagaaatgcaaaataggaaccactccgcagaatgattggtacttcttcagccacaaagacaagaagtaccccacaggaacgcgcaccaatcgcgcaactgctgcagggttctggaaggccactggccgcgacaaagtcatctacagcaatggaaagaggattggaatgagaaagactctggttttctacaaaggaagagcgccacatggccagaaatccgattggatcatgcatgaatacagactagacgacaacaacaccagcgacatcaatattgtgtccaatgtgatgggggatgctgctcaggaagaagggtgggtggtgtgcaggatattcaagaagaagaaccatctgaaaaccctagacagccccttagcttccggggaaggtagaaggagccacatgttcgactcgtgcgacgagggagctttggagcaaatacttcagcaaatgggaaggggttgcaaggaggagagcagctatgaaggcaactacaacagctatggaaggtttgcaatggggttgaacaatggcggcggcggtggatacaatgataggttcatgaagctcccgagcctcgagagcccaaaatccgcaagcatggagaaccaccacaacaccaacaacaactgcaacaataacatgaagagtggtggaggcctcaccaactgggctgcgctggaccgtttagttgcatctcaactcaatggccaaaccgatgcctctaggcaactaggatgtgctttcaacgaccccaccatgtattgcaccagcgtcgaccatcatgatcttcatcatcaaatccccaccctccgatcctcatcaacgtccgctaacacacgaccttcccctgcacccgcattcatcaaccccccaacacaggacttcaccagcgagattgacctttggaacttctcccgatccacgtcctcactgttggcatcctccgaaccactgtgccacgtgtccaacacgtcagtgtag

SEQ ID NO: 276 - DNA, 3672 bp, Glycine Max
atgcctgcgttaccgcacgggaatcatcaattcggtagtggcaatggattctggtcgaagaatcgtgacgatgttggatacaatcagctccacaagttttggtgtgagctgtcaccgcaagctcggcaggagctcttgagaatagacaagcaaaccctttttgagcatgcacgaaaaaattgtactgctccaggtgcaatgggttacttcttgaaggctttttgcagattgttacgtatgggaaatctttgcagcaagagggagcgggatgaaatgcaagatccaactgtccatccttggggtggtttgaccacaacgcgcgagggttcattgacacttttggactgctacttgtattcaaagtctctgaaaggactgcaaattgtatttgatggagcacgtgcaagggagcgggaaagagaattgctttatcctgatgcctgtggtgggggaggccgtggttggataagccaaggaattgtgagttatggtagagggcatgggacaagggaaacctgtgccttgcacactgccagactttcatgtgatacgctggtggatttttggtcggcactgggagacgagacaaggcaatctcttctaaggatgaaggaagaagattttattgagagactcatgtacaggtttgatagcaagagattttgtagagattgtagaagaaatgttattcgagaattcaaggaactaaaagaactgaagcgcatgagaagagaaccttgttgcaccagctggttttgtgttgctgatactgcctttcagtatgaggtatccgatgactcgattcaagctgattggcgccaaacgtttgcggatactgtgggattgtatgatcactttgagtgggctgtgggaacaactgaaggaaaatctgacattttggaatttgaaaatgttggaatgaatggatgtgtacaagtcagtggcctagatcttggtggtttgagtgcatgcttcatcaccctccgagcttggaagctagacggacgctgtactgaactttctgttaaagctcatgcattaaaaggtcaacgatgtgtacattgcaggctaattgtaggggatggttatgttacaattacaaaaggggaaagtatcagaagattctttgagcatgctgaagaggcagaagaagaagaggatgatgatttgatggatgaagagggaaatgagcttgatggagaatgctcccgtcctcaaaagcatgcaaagagtcctgaacttgctcgagaatttcttctagatgctgctaccgttgaaaaggctttcagagaaggaacagcacgccaaaatgcgcacagcatatttgtttgtcttgcactgaaactactggaagaacgagttcatgtagcatgcaaagaaatcattacattagaaaagcagatgaaacttcttgaagaagaagaaaaggaaaaacgtgaagaagaagaacggaaggagaggaaaaggacaaaagaaagggagaaaaaacttaggagaaaggaaagactaaaaggaaaggagaaagatacagaaagaaagtgttctgaatcaatggatgttcctggatctcctgaaatctcaaaggaagaattgtctcctgctgctgatgtagagaaaaataattctattagaggtaggagttcagtcattgtaacagagggtgattatcctaaaatacaagatgaagacttcactggagagggtagtaatttgagaacacaagactgctcttacgatgactgtgagggagtcattgcaaatgcgcatcaccacacttatgatgactgggatggagacattgcaaatgctcaagacatgaatggtacttctacagttgagcaatcaaaattttattgtcaaagacttagattcaggaaagactttcgactggatgcgcctacaaaatggtctgacagacaccataatgcagttgcttcagaaaatggtgtggctgttggaagatcagagccaatacaccattcagataattttggggtgtcttccaggggaatcaatgggttgaacaggcaatctcgaataaatgttgcaaaatccaatagtcgaaacattggtcataagtgcagcgagaggttttatggttccaacagctggatgaacgacagatatgatttccattcatgcaattgtagcccgaataatagaaccaatagagttagttgggagacaaaacctgctagtaagtctgaatccacagtagatacatctaagcaattttatcgtggtagcaagtataatcatgtagacttcatgcatgagagtaatggaagaaccaaaggcagagtcatctcagggaactattccagcagggatttgcctcaatcaaagaaagtttgggagcctatggagtcacacaagtatgctcgtagtaatttagactctgatgtgacattggggtccacaggtcatggatttcagttcaatacagtaaggttttctgttgatgaagttggcggttcaggtgaaattgatgagggtgatagtaatttgaaaagaagcggaatgggtgaaggctgtcagaatgatcttgatgcagaagttggaggatcttgcagctccacagaaattgcatctgaggctggaatgtgtgtgatgggtggctctgcattgaataattcttctgatcccaatcaaggtaacacttctagttctgataactgctcatcatgcctaagtgagggtgataataatacaacctcttcaaaccgtgaaaatacagaatcctcaacatcggattcagaagatactagtcaacaatctgaagtgagagatagttcaacctgcattgacaatggattatctggctctcatggagctgagatgaagaaaatccataatgcaaatgatgaaggtttgactagcaggtcaccatttggtccatccttggatgtggcaagaggggatgtatccgggaatcctgtggtgaaaattgcacataagtttgataatggtttttcctccattagtatgtgttctcaacctcaaagcatgcttcctccagtgccaaaccaaaatattcaatttccagtgtttcggacttcttcagcaatgggttattaccatcaaaatccagtttcattgccagctgctcccacaaatgggttgatgcctttcccacacacaaacccctacttatatgctggcccttttggatatagcttaaacgaggatccacgcttctgcttgcagtatggtggcttacagcaaccaacacccctatttaacccagttgcatttccagtttatcagccaatcgccagagctaaaggcttaaatacagaggaatcgactctaatgtccaagccaacatctatgctgccagagcatcttaatagatcttcagtagaaaaggtttctctaaccggagctaattcgcaaaaagcagcattgaatggggaagttggacatggtaattctgcaaagtcaaaagacagtggtttttccctgtttcattttggtggccctgtagacctttcaactggtcataaatcggcaactgcatcttcaaatggcgacaatgttggagattttaacttaaagagttcagtagatcaagttgacgatgatcatgaatgcaataaaaaagaggctactgtcattgaggagtacaacttgtttgcggcaagtaataccttgaggttttcaattttctaa

SEQ ID NO: 277 - DNA, 906 bp, Glycine Max
atgcgcaacactataaattgggacaccgagcgcatcgcacgttacttgtacttgccctcagcaccagccgaaagccaagaaaaagctttcgatccctgtaactgcgttcgactatttagggttttttcggagacaatggcggatgaatcggagcacacggcggcgccggctgccggcgaatcgctgctcgacaagatcgccgagaagattcacggccacgacgactcttcctcttcctccgattccgattcggataaaaaggaatcttcgtcgattaaggagaaggttttccgcctctttggaagggagaagccagttcactccgtcctcggcggcggaaaacctgctgatgttctcttgtggaggaacaagaagatatctgctggtgtacttggtgtagccacggctatttggatcttttttgagttgcttgaatatcacctgcttactctagtctgtcacatttccattctgttgcttgcggtcttatttttgtggtccaatgcccatacctttattcacaaggcaccacctcgcatcccggttgttcatatccccgaagaaccaattctccaatttgcatctgcattgacaattgaaatcaaccgtggatttgctgccttgcgtgctattggttctggaagagatttgaagacatttctcattgttattgttgggacgtggattatatcaattgtggggagctggtgcaatttcttgaccttgttctacattgcttttgttttgttgcatacggttcctgtcttgtatgacaagtatgaggataagatagaccctctagcagagaaggcactcgttgagttcaagaagcagtatgctgtgtttgacgaaaaggtcttgagtaagatcccgaaaggcccattgaaagagaagaagttagcttag

SEQ ID NO: 278 - DNA, 2931 bp, Glycine Max
atgcgctcaggagtttgtgcattacagcagaccctcacagctgaggctgcttcagtgttgaagcactctctggggttggctcggaggaggggccatgcacagctcactcctctgcatgtggctgccactttgctaagccttagaggcagttccttgagaagggcttgcctcaagtctcagcctcaccaaacttctcatcatcctcttcaatgcagggcccttgagttgtgcttcaatgttgccctcaacaggctccaaacaacaccttctcctttgatccacactcagccttctctctccaatgctctcattgctgcattgaagagagctcaggctcaccagagaaggggctgcattgagcaccagcagcaacagcctctgctcaccatcaaggttgagctggaacacctcatcatatcaatccttgatgaccctagtgttagcagggttatgagagaggctggcttctccagcactgctgttaagaacaacatagaggactcttcacctcattctgttttccagtgttacaatagttctggtggtgtgttctcttctccttgttcaccttctgccagtgagaacaacaaccatagggaaacagccaccaaccctaccaatttcagacaccctcatcattacttaacttcttatgcatcttctgagttccacccttcacttctgttttctccaccaaagaataattcaccagtgtgttccatcactggtgcagcttcttctagtaaggatgatgtcaggcttgttctggatatcctcttgaggaagaagaaaaagaacaccgtgattgttggtgactcactgtcattaactgaaggccttgtggcagagctaatggggaggctagaaaggtcagaagtgcctgatgagttaaagtcaacccattttatcaaattccaaatttcacatgattcattgagttgcatgaagagagatgaagttgaaatgaaactcttggaactcaaaaggaaggtggaatccattgcttcaggaggaggagggggtggcattttttatattggagacctgaagtggacagtgaaggaggcaagtttcagtgagaaagaggaaggatccccaaatggagaagtttctggttataaccctgttgatcatcttgtttcagaaatagggaagttattctctgattgtggaacctcaaataatgctaaggtgtggctcatggccactgctagctatcaaacatacatgaggtgtcaaatgaggcaaccccctcttgagaagcaatgggctcttcaggctgttcctattccatcaggtggacttggcttgagtcttcatgctcccagtgtccttcattcaaagatgattgtctcgcataaccaatctcatgtgccggaaacaaatccctttggtaacatggagcaggagaataagctcaattgttgtgaggaatgtgcctccaattatgaaaaagaagcccaatttctcaggcccgaccaaaagaaaatgttgcctctctggcttcagtctcatagcacagaagactctaagaaggatgaattagtccaattgaaaagaaaatggaatagactatgccactgtctccaccaaagcaaacagcctcagaaccaatggagctggaaccacaacagttataattcaccaagctctatatcctttgccaacaatgccacacatggctccacttccaaacttgtccctcgattccagcgccaacaattatgcatcattgagttcaatttcggcaacaaaagggaagcaacagagccagtcttggattcccttgagagcatggacggtaaaaaagtaaagactattcttgctcttggcaatggtggttcaggtgagtcgacggtgggggatataactgatacaacactgcaacaagctcatatttgtaaactattgcaggagaatgtaccatggcagtctgagactgttccttcaatagcagaagccttgattgattccaaatcagcaaagcaaaataacaatattacttggttacttgtgcaaggcaatgacaccattgggaaaagaaggttggcacttgcaattgcagaatcagtttttggctcaactgatgtactccttcactttgacatgctaaagagagagacttcaatagccccattttctgaaatgctggaaggagcactgaagacacaccaccagcttgtgattctaatagaaaatgttgactttgctgatgcccagttcaagaaattcctctcagatggatttgaaaagggaaagtttggaaatttcacagaagagaactcaagccaagtaatattcatattgacaaatggtggatgtggatccactagcaatgaagagcagaatgataacttgagaagagctgaacttgatttgttttctaacaccaacagttctcaagggagcaagaagaaacagttttcaagacaaacaagctttaacactcttgatctgaacatgaaagctgatgaagaggataaagcaggagagagtagccccatttcaagtgatttgactggagaaactatagctgatccgttgaaccaaaatgggtttcttgactcaaatgtgaaccggtttgagtttaacacaaatccagttaaggacagagagatggcagagttgtttctgtgtaagttcaaagggtcttttgaggaggtttgtgggaagcaatgttgggagaatttaagtgtagatgagagggtgattgaggatgtgagtgttgggtgtggttattttaccaacagcttgtttgagaaatggctgaaagacgtttttcaaagcagtttagaaacagttaactttggagggaaggagggtatacttttaagactttcttgggagggtaaaggagatagaaaatcggatagtgggttcatgagttcttctctgcccaagagtatccaagttaattacttcatagagtga

SEQ ID NO: 279 - DNA, 2931 bp, Glycine Max; identical to SEQ ID NO: 278

SEQ ID NO: 280 - DNA, 1368 bp, Glycine Max
atgcgttatacttatacgggggaagcggtggttggttgttccttgtctggatggacgaaccagaagccgaaaacactgcctccgcttcctgggccagaaactccaagcctaacaacaacaacatcatcattaccaccggcacaaccacaaccacagcccatgctcgatgttgacgacgaatggtacaacaacatcaccaaccaccaccaccaccaccaagatatggccttcgaccccgacaacctcttactccacccctccgccgtggactcctcctcctcctgctccccctctcacctccagttcttcctccctcccaaccccaaactcaaccccttcgatatgggctttcttgaccctcaagcttcttcttccttaccccttctcgcctccgaaacaacacacttcacaccccctcagaccagcaccaccaccgctttcgccggcttccagagcctccaagagggttcctccaatcctctctttctcaaccgttccaacattctgagacctctcgagtcgctgcccccctccggggcccaacccacccttttccagaagagagccgcgctcaggaagaacatgaacatgagtgacaataagaagaggaaggagaaggatgaggtggtggttgaggatgtgagtttcgacgggtctggcttgaactacgattctgacgacttaactgagagtaattataatgacgctaaggagaagaatggtggtgggggggttagttccaatgccaacagcaccgtcaccggtttggatcagaaagggaagaagaagggaatgcctgctaagaatttgatggccgaacgacgccgccggaagaagctcaatgacagactctacatgctgaggtccgttgttcccaagattagcaaaatggacagggcttcaattcttggggatgcaattgagtatctgaaggagcttctgcaaaggatcaatgatctgcataacgaattggagtcgacgccggtgggttcttcgctcactccagtctcaagtttccatcctttgacgcctactcctcctacgctgccgtgccgaatcaaggaagaactgtgccccagctcattgccaagccccaatggccaacctgctagggttgaggttcggctgcgtgaaggaagggcagttaacatacacatgttttgtggccgcaaacctggtctgttgctctcaaccatgagggctatggataaccttggattagacattcagcaggctgttatcagctgcttcaatggatttgctatggatatttttcgagccgagcaatgcaaagaaggtcaggatgtgcatccggagcaaatcaaagcagtactcttagattcagctggctacaatggcatgatgtaa

SEQ ID NO: 281 - DNA, 858 bp, Glycine Max
atgctaactggtgataggttacctgatggaataaacaaatgtttcggtcagcagacaatacatttctttggagtctatgatgggcatggtggctctcaggtggcaaagtattgccgtgagcgcatgcatttggccttggctgaggaaatcgaatctgtcaaggaaggtctattagttgaaaataccaagaatgattgtagagatctgtggaaaaacactttcaccaattgttttttgaaggttgatgctgaagttgggggggaagttaatcgtgagcctgttgccccagaaactgttggatccacttctgttgttgctattatctgttcatctcatatcatagtttcaaactgtggtgattcaagagcggttctgtgtcgtggcaaagaacccatggcgctatctgttgatcataaaccaaatcgagatgatgaatatgcaagaattgaggccgctggaggcaaggtgatacaatggaatggtcaccgagtatttggtgttctagcaatgtcaaggtctattggtgataggtatttgaagccatggattattccagaccccgaggtgacgtttcttcctcgtgcgaaagatgatgaatgcctcattctggccagtgatggcctgtgggatgtcatgaccaacgaagaggtgtgtgacattgctcggcggcgcatacttctctggcacaagaaaaatggcttggcattgccctcagaaaggggagagggaattgatcctgctgcacaagcagctgcagagtacctatcgaaccgtgctcttcagaaaggaagcaaagacaacatcactgtaattgtggtggatttgaaagctcaaagaaaatttaagagcaagacttga

SEQ ID NO: 282 - DNA, 1194 bp, Glycine Max
atgctactctacttaatcacttgcatctccttccttctgtttttaaagcctctcctctctctcaaaccactcccatcatgggcaagtgaattgaggttgatctcccctttgttttacaaagacttgtctgtgaagtccatctctaagttgtttaggaaccgcctttggcttggttttctttgtcaaattcccacaagaatgtctctaatgaagaagtcttcaaaggtggagaatattgaggactcccaagatatgtcagtgttggacttgccagagctggtgttagaatgcattcttgaaaagctccctccagcttcactttgtcaaatggccggggtttgccgctccctaagagagagctgtgtgagtgatcacctttgggagagacacatgaaacagaaatggggtagaattattggtcaagctgcttatagggagtggaaatggcatgttgcttccaaagggaatgttggaactcttagacatggaaaacaaaggagcttgttgaggcttgtgtcccttagctggcctttttcatggatgagaaccaaggtagatgcaaataatagcatcaagcagcaaagttatttgcctcctgattcactcatgacttggtatcttgctctggagactggcaatttctggtttcctgctcaggtctataaccgtgagaatggccatgttggatttatgttatcatgctatgatgctgagcttagctatgatcctcacaatgacaccttccaggccaggtatccaccacatggaagaaggacagttgcagtagagcatggcattccatgggaaaggctaagagcaccacctgttgatactcctccacatgatcttcatatctctgattgtgtatatgatttgcatccgggcgatcacatagagattcagtggagaagaaacaaagaatttccttatggttggtggtatggtgttgtaggccacttggagttatgcgatgggaatgaaaattactgccgttgtcatagtagtgacacagtggtgctagagttcaatcagtacactcctgactcgcgttggaggaagacaactataagtagaaaagatcatagagaggaaggaaatgaagcagatggtttttatggaggaatcagaaagattaagagtgagactgagatttccatttggaaaagcatttggccttctgaagtcttggactaa

SEQ ID NO: 283 - DNA, 4578 bp, Glycine Max
atgctacttataattcaattggaagtcagtactctatgcaaagataagacatacagagttgctttccgtactagcactatacctactgatagcaacagagcaacaccagaagaagacacagaggaagcaacagacataaacacaggggaggcccctggccctcgaagccagcaacccgagcacgagtaccgtaccaatttggtgctctcgttgctcttcaccatggtagaccctgaacccgcctcattttcgtcggacaagctggaggatgtcctcagccgactcactaaacagcagctatatcttggagagtctgtcaatgccatgactctcaagattgacgaactcattcaacgagtttctccagtgttctccaccacgccacccactccaccgccgttaccaccgccggcacctacacccatacacagattgaaattagatgtgccaagatttgatgggtcagacccacttggctggatttacaaaataactcaattctttgagtaccatggtaccccagactcagacaaactcaccattgcttccttttatatggaaggtcgcgcgcttgcctggtttcaatggatgaacacctctgagcaatttccgtcatggcctgccttcttgcatgcactgcgcactcgctttgccccttcacaattcgaggacccttccggagctttgagcaagcttacccagaccgggacggtaacccagtacctctctgactttgaggaccttgctaatcgcacgacggggttgccctccaccttccttcttagttgctttatctccggcctcatcccggagatacggagagaagttcaagcccaccagccggccaccctggttcaagccgcgggtctcgcgcgcttgcaggaggagaagttctccgagatgcgtcaacaccctcgtcctcgtccttcccctttgccccaattccagagatcaccctcagtgtttccctcctttccccaagtcaaccctactgcccccgtatcctctccacccctttcccctatcctcaagacaccctcaccgccactttcttcgaccttaccacctctcttaccacccccgcccccgcgaccaccgccccaaacctggaaacggttgtccccagaggaaattgcctctcgaagggaacgtggcctctgtttcaattgtgaggagaaattccatcgagggcaccgctgctcctctaggttttttctcctcataactgatgaggaagacccgcccctttctcatatacccaattttgacccgcccattactttaactcatgacccggtacctatccaacccacagacccacccgaaagcccactttcatactcagcccaaatttcacttaattcccttgctggccatgtcgctccggagacaatacgcttcatcggtgccatctccggccaccctttgttgctactggttgatgggggcagtacccacaactttgttcagcaacaattggtgacccaattgggcctctcttgccggaccacttctcctttgcgtgtaatggtgggtaatggccaatatttggagtgtcattccatatgtgacgccatttccgttcagattcagaatcacagcttcacggtcgacctccatgtcctcccaatctcgggtgccaacgtggtcctcgggggagaccccgaagctagcctgagctccatgacttcatcccagttttgccgtctttgtcggacacagccccagggcctttattttcagatcacggtcctttctgatgacaccccaccttcttccccagacaccttacccccttcccttcaagctctgctcaccaagtacgatgtcctctttcaaccatctccgacacttccaccaccacgtcccactgaccaccacattcatttactacccctatcaacgccggtcaacgttagaccttatcgttacccccatttccaaaaacaggaaatcgaattgcaagtcgactcaatgcttcagaagggtttgatccaacccagtacaagccctttttcctccccagtcttattggtgaagaagcatgatggatcatggagattttgtgtcgactaccgggcactgaattccctcaccgtcaaggacagatttccgatacccaccatagacgaattacttgatgaattggggggcgctcaatgcttctccaagctcgatcttctccaaggttatcatcaaatacgcatgcattcagaggatatccctaaaactgcatttcgaactcatcatggacattatgagttcagagtgatgccctttggcctctgtaatgctccatcttcctttcaagctacaatgaacctcattttcaggcccttccttcgtcgcttcgtcatcgtcttcttcgatgacatacttatctacagcagctcttttgatgatcacttgcaccatctggacttaactttccaggttgaatatttgggacatttagtttcccaacgcggagttgagcccatgcctgataagattgttgccattgttaattggcctcaacctcactccaccagagctgttcgaagttttttggggctcgccgggttttatcgtagatttattcggggatatgccatgattgctgaccctttggttaaggccacctcggacccctttcgttggaccccacaagctcaacaggcctttgaagacctcaaatcggctttgtcaactactcctgttcttgcacttccagactttcaggagcctttcacagtggagactgacgcttccggcaatggcatgggcgctgtcctatctcagagaggacaccccattgcttatttcagcaagccattccctaagaagctcctcagggcctccacctatgttcgtgaattatttgctattacctctgcagtgaaaaagtggcgccaatatctcttgggccactcattcaccattgtcaccgatcataggagcttgaaagagttgctcacccaagttattcaaacacccgaacaacatatgtacctggcccgattaatgggatttgattatcaaatccagtaccgctccgggaagcacaaccaagcagctgatgccctctcacggtcaccggaattcactccttcactttcgttgctcttatctattccttgtttgagctttcttgatgaattacgtcagcagctcaccaataattctcagtattgtcagcaccgacaggacatcatcaattctcccaccacctaccccgattacactcttagtcagaatttcatcctttacaagggcaaaatttggttaccccgcgagcttcctctcattcagacactcatgctagagtaccacgcgacgccgatggggggccatatgggcgtcgcaaagacgatagctaggctatcggaaaatttcacatggccgggactccgttctgatgttgcgaccttcgtggccaattgctctgactgccaattcaccaaatatgagacgaaacgcacagccgggttgctttgtcccttacctgttccctttcggccatgggaggacctctcccttgatttcatcactgggctcccttcatatcagggcaaaacggtgttacttgttgttgtggaccgattttctaagggtattcacttgggcaccttacccaccgcgcatacggcacacatggtcgcctctttgttcattgacatcgtggtcaaactccatggtcaacctcggagtttagtttcagatcgcgatccacttttcctgagtaccttttggcaggagctttttaaattgagtggtacaaggcttcgaatgagttcagcctaccatccacagagtgatggcacgggctctacgccgtatgagataacgtttgggcggaaacctttctcttttccagactatatcactggctcctccaaactagatgcggtggatgatactctgaagcaccgtgaggaagtttttctttgcattcgtcagaagctattaaaagcccaagctacgatgaaacgcactgctgatactaaacggcgtgaagttgactatgaggttggtaattgggtacttttaaagcttcggccctaccgacagcgttcggccaaggatgctcagcacagctccggcaagttagctaagcgcttctacggtcccttcaagattctcgagagaattggtaaggttgcttattgtttggaattaccagagggcacgcgaattcatcccatattccactgttcacttttaaaacctttccatggggatcccgccatcagtcagaccccctcacttccagaccaattcttcaataatcagccaattatttctcccttggcaattttggatactcgtcgtgctgcaaccactgagggaccatgggaggttttagttcaatggaaggggttacttcctgatgacacctcttgggaagattgggatcaactgaagcggacctatcaccttgaggacaaggtgattctccaagggccacgggaagatgatagcaacagagcaacaccagaagaagacacagaggaagcaacagacataaacacaggggtaccaacagcaaaaccgaaaaggaagattaccaggcccgcatacctcagagattatgcttga

SEQ ID NO: 284 - DNA, 1799 bp, Glycine Max
atgcttcgttcacggcggcgctccccttacggcgcctacctctgcgccgtgatctccgccgtgctcctcctcttctccgtctccctcctctactcccgcctctcccgctcccacccccactcccaccacctcccccgtccctccctcgtttcccactccacctccgccgacatctccatcgcctcctccgacgaccccatcgacgagctcgacttcatcgacgaaaccctagatcccccctccctccgcctcaaccctcccccctaccacctcttcttcgatcccctctccgcctccctccgccgctccttccaccaccgtcactccgacaacaacaataatttccccttccaatccttctccgataatgatgaccgttccaaaaccgcattcgcctccgacgacgttcccgtggacttcaccgtccgttccatggcggcgcgtgtggccacaatcgacgacgcgctgctgctcaaaacctctcccttaagagaaggatggagcgactggttcgacaagaagagtgtgtttttaagaaaggatagaatgttcagatccaacttcgacgtgcttaaccctctcaacaaccccttgcttcaagatcccgacgccggcgccgccaccaccggactcaccaggggggacagaattgtccagaagtggtggatccatgagttcaagaaagttccattccctggtatcaagaagaaggctcctcttaatgtcaatgtcaacactctcaccaaagttggcatagaacgcagaactttgaatcataaccacaacaacaatgatgatgataataataataatgagattattaaagaagttaatcatgtgtatgcggatggggatacttggggctactaccctggattgccgcggctgcgattgtcgttcagtgatttcatggatgagtttttcaggctggggaaatgtgttactagagtgtttatggtgtggaattcgccaccttggatgtacactgttcggcatcagcgtggtctcgagagtttgctctttcatcaccccgatgcttgtgttgttgtgttctccgagacggtggaacttgatttcttcaaggacagctttgttaaggatgggtacaaagttgctgttgctatgccaaatcttgatgagcttctgaaggatatgcctgctcacatttttgcttctgtgtggtttgaatggaagaagacaaatttctattctactcattacagtgagcttatccgccttgctgctctgtacaagtatggtgggatctatctagattcagatatcatcgtgttgaagccgatttcttttcttaataattctgttggtatggagggtcatggtgctggaagtgctttgaatggtgctgtaatgtcttttccaagacacagtttgttcgtaaaggagtgtttggaagagttctacatgacatatgatgataccagtttgagagggaatggtgctgatctgttgacgagggttgctcgaaaatatttaggagatgagaataaatctgttaagcacttggagttgaaagtagaaccctcttatatcttcttccctgttagttctcagaacataacaagatacttcattgcaccgacgacagagactgagaaagctcaacaagatgtgctgcttgaaaatatcctgcacaattcgttgacatttcatttctggaacagcgtgacattttctctcatccctgaaccagatagccttgtctccaagcttttgaattatgctttgtctactactaaaagagagctaagatatactgaaaactttgtaaagcaaaacta

SEQ ID NO: 285 - DNA, 1476 bp, Glycine Max
atgcttcttctaaaaaccccactctgttatctcaacctaaacctcccaaacaccccatccatggcgggagcaacaggcagaaccctcttcaccctctccctctcttcctcctcttccctcacgcgcctctctctcatccccaagcgcgtcccactccccaaacccctccccctcttccgccgcttccgccctctctgctccgtctccgccgccgcgccggaagctgccgacgcgaagcactcaatactcctcgagaggctccggtcccgacacctccgtgacgccgcgaaggccgcccccgaaccgaggaagaaggagaaggtcgccgccgcagccgcagccgccgccgccgccgccgaagcgaaggagaagaagaaggcggttgcgagcttcgaggagctgggactgagtgaggaggtcatgggggctgttagggaaatgggaattgaagttcccactgagatacagagcattggcatccctgccgttttggaagagaagagcgtcgttttggggtcgcacactggctctggcaaaaccctcgcttacttgcttccccttgctcagttgttaagacgggacgaacaattgaatggaatactgttgaagcccaggcgtccacgagctgttgtgctgtgtcctacgagggagttatccgagcaggtttttcgagttgcaaaatcgataagccatcatgcacgattcaggtgtaccatggtaagtggtggtggccggcttaggcctcaggaggattcacttaataaccccattgatgtggtagttggtacccctggcagggttcttcaacatattgaggagggaaatatggtatatggtgacatcaaatacttggttttggatgaggcggacacaatgtttgatcggggctttggtcctgatatacgcaaatttataggcccattaaaaaatcgtgcttcaaaacctgatggcctaggttttcagactatcttggtaactgcaaccatgacaaaggctgtgcaaaatctgattgatgaggagtttctaggcattgttcatctgcgcacgtcaacattgcataaaaagatttcttctgctcgtcatgattttattaaacttgcaggttctgagaacaagcttgaagcattacttcaggtactagagccaagcctagcaaaagggaatagggtgatggttttctgcaatacattggattcaagtcgtgctgtggatcattttcttggtgaaaatcagatttctgctgtgaactaccatggggaggtaccagcagagcaaagggttgaaaatctcagaaagttcaagagtgatggtgatgattgtcctacattggtttgcacggacttggctgctaggggtctagacttggatgtagatcatgttgtcatgtttgacttccccttgaattccattgactaccttcatcgcactggtagaactgctcgtatgggtgcaaaaggtaacaagtttagttgctaa

SEQ ID NO: 286 - DNA, 435 bp, Glycine Max
atgcttgctgctttaaagcagagggaacaacaatttgggggtttaagggcttccatgatgaaggagaaggaggaggaactcacattgtttttggagatgaagaagagtgaggaggaaagtaataaccttcttcttaacaactctaaggatttttatgcatctctcgggtcaaatgggggcgttaaccacatttttaacattttgtcttctacgccgactcctatgtggaagactggtgttgatgattttctcaatttagaaaatgataagaatgactatgactatttgagttatttctatacattattattgcttctcattcatgttgcaaacttcctatttcttacttctcttaaagattcttctatgcttgatgccgagacttgcttgaaagctcttgaagcacttgataacaaggatgaactttcttgctct

SEQ ID NO: 287 - DNA, 1047 bp, Glycine Max
atggaaaacgttccggcggtgtgtaaggaagatgatcagatggatttgcctcccggatttcgattccacccgacggatgaagagctcataagccattacctctacaagaaggtcattgacaccaagttctgcgccagggcaattggagaagtggacctcaacaagtccgagccttgggatttgccatccaaaatgggagaaaaagagtggtactttttctgtgtgagagacagaaaataccccactggcttgagaaccaacagggccacagaagctgggtactggaaggccacagggaaagacaaagagattttcagaggaaaatctttggttggaatgaagaaaactctggttttctacagaggtcgagcacccaaaggagagaaaagcaattgggtcatgcacgagtaccgactcgagggaaaattctctgctcacaacctcccaaaaactgcaaagaacgagtgggtgatttgcagggtgtttcagaagagttcagctgggaagaaaactcatatctcggggataatgaggttggactcttttgctaatgaattgggttcttctgctctgccacccctttcagattcttcgccttctattggcaacactaaacctctgaatgattcggcttacgtgccctgcttctccaatccaattgatgttcaaagaaaccaagaaggtgtcttcgattccttcaccaactctatgtatggggtttcttcaaatcctatggacattcttcccagaatgccaccttctggctccttctactccactcaaggtgttcaagctgcgcctaattttgcatttcctggttctgtttacactcttcaggaccacaccatcctgagagctttgtgtgaaaacaatggttacaagccagagagggacatgatcagtgtttcgcaggaaacgggtctaactactgacatcaacgctgaaacctcttcaaattttgatgtgggttggaggccctttgagaatcacaatcatgcatctgtttctgttgccccattggatcttgatggtttgtggaattactaa

SEQ ID NO: 288 - DNA, 690 bp, Glycine Max
atggaacctcctctcatcaacgactccacattctcttccgctaacccttccttgtccgagatttggccctctcattttcccacagaccacactcccagtaacaagagacacctctccccctcgactgattgtggcagcaataaacatatcaaatcatcaggatcaggatcccaggatcaaaacggtgccttgaaggcgggtgaagtggacgcgacttcagtagccggtaacaagttacccgaacaaacggcgaaacctagttcttccgagcagccacctaagcaagactatatacacgtgcgagctagaagaggccaagccaccgatagccacagtctcgctgagagagctaggagagaaaagatcagtgagaggatgaaaattcttcaagatatagttcccggctgcaacaaggtaattggtaaagcacttgtgctggatgagataattaattatatccagtcactgcagcatcaggttgagttcctttctatgaagcttgaggcagttaattcgagattgagcatgagccctactattgaatgttttccttcaaaagaagttggcactcagccatttgaccttgccggaataatatttggatcacaaccggccaggggatatgctcaaggatcacagccgggatggctgcatatgcagatagctggtggttttgagaaagcaacataa

SEQ ID NO: 289 - DNA, 4113 bp, Glycine Max
atggaactggagaagacaccaacaagtttggtttttggtgttaatggtgagaggtttgagctctcccacgttgacccatcaaccactttgctccaattcttacgcactcgcactcgtttcaagagtgtcaagctcggttgtggtgaagggggttgtggcgcttgtgtagttttaatctccaaatacgatcctgtgcttgaccaagttgaggattttacagcaagctcttgtctcacactactttgcagcatacatggctgttcaataacaactagtgaaggcattggaaattctaaagaaggattccacccaatacataaaagatttgcaggattccatgccactcaatgtggcttttgtactcctggaatgtgtgtttccctctttggaactcttgtcaatgctgaaaagactacttgtccagagccacctgctgggttctcaaaagtaactgttgctgtggccgaaaaggcaattgcagggaatctttgtcgctgtactgggtatcgaccgattgctgatgtctgcaaaagctttgcagctgacgttgatatggaggatttggggttcaactctttctggagaaaaggtgataacaaggactcaaagcttagtaggttgcctcaatatgaccataatcaaacgaatagtagatttcccttgtttttgaaggaagtcaagcatgatgtgttcttagcttccgagaagcacagttggcacagacctattagtctaatggagcttcagagcttattgaaattaaaccattgtaatggaacccggataaaaattgttgttagtaatacaggtatgggatattacaaagaaaaggaagcctatgataagtacattgatctaaggggaatttctgagctttcaaagatcagaaaggatcaaacagggattgaaattggagcagcagtgacaatatctaaagctattgaagcactgaaggaagagagcagaagtgactttctctcagattatgtgatgatacttgaaaagattgctgaccatatgagcaaagttgcctcaggatatattcggaacacagccagtgtaggtggaaatttagttatggcacaaaagaataattttccctcggatattgctacaatacttcttgctgtagatgcaatggttcacataatgactggtacacaatttgagtgcctaacattggaggaatttctcgaaagaccgccattaggtttggaaagtgtgcttttgagcattaaaattcctagtttggaactcaataaaactgaatcatcagaaccaagaagtagattcctttttgaaacttaccgagcttctcctcgaccccttggaaatgcccttccctacttaaatgctgctttcctggttaaggtgtctcaatgcaaggattctggtggaactgtgattgacacttgtaggttctcttttggtgcttatgggagtaagcatgcaatcagagcaaaaaatgttgaggagtttttagctggaaagcttttaagtgctagcattctatacgatgctgtcatcttggttacagccactattgtacctaaagatgatacctcaaaaaccacttaccgttcaagtttggcagctggttttatttttcagttctttaacccacttcttgatgcttccgcaataaacaatggttattttaatggacatattaatcttccttatgctaaggattttgagttaaaagagaatcagaagcaggttcgtcatgacaaagttccaactttactgtcatctggtaagcaaatccttgaagcaggctgtgactatcatcctgttggtgagccaattatgaaatctggagctgcactacaagcttcaggtgaggttgtgtttgtggatgacattccatcaccagcaaattgcttacatggagcatatatttatagtgcaaaacctttagcaagggttaggagtataaaactcacaccggaattgcaattggatggattgagggatatcatttcaattaaagacattcccaatggtggggaaaacattggatctaagactatatttggggttgaacctctctttgctgaagagatagccagatgtgttggtgaacgactagcctttgtggtcgcagatactcagaaacttgcagatatggctgcaaactcagctgttgttgattatgataccaaaaatcttgaaccacctattctatccgttgaagatgctgttgaaagatctagcttttttgaagttcctccttttctttatccaaaacatgttggtgatatatcaaaaggaatggctgaagcagatcacaagattctttctgctgagttgaaacttgggtctcaatactatttctatatggagacacaaactgcacttgctgttccagatgaagacaattgcattacagtttactcctcaaaccaatgccctgagtttgcgcattctactatagcaagatgcctaggaattcctgaaaataatgttcgtgtaataacaagaagggttgggggtggttttggtggaaaggccttgaaagcaatatctgttgccacatcatgtgcactggcagcacagaaattacagcgcccagttagaatgtatctaaatcgaaagacagatatgataatagccggaggaaggcatcccatgaagataacttacagtgttgggtttaggaatgatggtaagattactgcactagaacttcagatattgatcaatgcagggatatatgtggatataagtgcagttatgccacatcatatagtttgtgcacttaaaaagtacgactggggtgcactatcttttgatataaaggtatgcagaacaaatcatcctaatagatctgcaatgagaggccctggggaggttcagggatcatttattgctgaagctattatagaaaatgttgcagctacactttcaatggatgtagattctgtcagaagcgttaatcttcacacatacaaaagtcttcagtcattctatgagtactatcatggtgaaccttatgagtataccttgccttcaatatggagtaagttggctgtttctgcaaactatgaccagagaactaaattggtgcaaaagttcaacaggattaacacctggaagaaaaggggaatttctcgagtaccagctgtgattgaactgactctaagaccaactcctggaaaagtaagtatttttgtagacgggtctgtcgttgttgaagttggaggaattgaagtgggtcaaggtctttggacaaaggtgaaacagatggctgcatatgctctgggtgatattcaatgtgatggaactgaaggtcttttggacaaagtacgggttgtgcaatctgatacggtgagcttgactcaaggaggcttcactgcagggagcactacatcagagtcaagctgcgaagcagttaggctttgctgtaatatcttggtagagaggctaaagcctcttaaggaaaagctgcaggaggaaatggactctatcaaatgggagacccttattctccaggcatacatgcaagctgtgaacttatcagcatcttcattttatgtacctagtaatgattccatgggttaccttagttatggtgctgcagtaagtgaggtggaaatagatcttctgaatggagaaaccagatttttgcaaacagatattatttacgattgtggacagagtctaaaccctgctgtggatttaggacagattgaaggagcttttgtccaggggttgggatttttcatgcttgaagaatacgaaacaaatcttgatggtttggtgttgcaagatggcacttggaactacaaaatcccaacgatagacactatacctaaacagtttaatgttcaaatcctcaacagtgggcatcaccagaaacgtgttctctcttcaaaagcttctggtgagccaccattacttctagcagcctccattcactgtgccacaagagcagctgtaaaagaggcaaggaaacagcttctttcatggagcaaccaagatgaagaagattcaacatttcagttgggggtccctgcaaccatgcctgtggtcaaggaactctgtggactggacattgtagaaagatacttgaaatggaaaatggggaaggacataatggtgctcacttaa

SEQ ID NO: 290 - DNA, 1050 bp, Glycine Max
atggaagagcaaaggtttgaattgccaccaggattcaggtttcatccaacagacgaagaactcatcactcactacctctcacagaaggttcttgatagctgcttctgtgcaagagccattggagaggctgatttgaacaagtgtgaaccatgggatttgccttgtatggccaaaatgggtgaaaaggagtggtattttttctgtgtgagggacagaaaatacccaactggtcaaaggactaatagggccactggtgctggatactggaaggccacaggcaaggacagagagatatacaaggcaaagacactgattggaatgaagaaaactctggttttctacaaaggaagagctccaagtggtgaaaaatctaactgggtcatgcatgaatacagattagaaaatgaacattctgtgcaaaatccacccaaaaaggccatgaatgattgggccatctgcaggattttccagaagagtaattgtgggaagaaaatgcccatttctaggttgttgaggttcagcacttttgcaaaggacataccttcattgatggattcttctccaaacaacaacaacaacagtgaatcaaaacctgttttgggggagtcatcacatgcaacctgcttctctgatccaaaccaaagtgaggataaaaaaacagaaaacgaaaacatagctgaaagctatgaaatcatcatgttggcatcttcatattcttcaaacccctctgatgtttcccctgactcatggactttttccaaatctgcccctactgtgtcccaccaatcactccaagttggaaactcacactgctcagattacttcatgcttcatcaggaacagtccatgttggggatgttgattgaaaaccatggatcaagtactggccaaagaactcagaaagctcaggataataataaagactttgatgctgacatgtcctcggtgatgtacaacaacaatgaaatgtttcaaagatcatttgggaaccaggaatattcatcaccttctgtaggacatgtgtattctagtggcctatggggattttaa

SEQ ID NO: 291 - DNA, 999 bp, Glycine Max
atggaagaggaagaggtgaatcgatgccagattcaggaatggtatccaaagttcaaatctgtatccttcaagaccttaattcatcaacttcctgaatcatttattcagtaccttcttgatgactcagggcccttcctgttgcctgattctgtcttaaatgaagatgcattacccaatagaattcataacccagatgaggaagaagattttcaggtgtctgagggatctggtgatgaagcagaagcttctgcaccaccttcttttccagaacttgaattgaaaattaaggacttcattgagtcccttgggggtgcagtcttccctaagctgaattggagtgccccgaaagattcagcttggataagcacctctggtacccttcgatgcatcagtttcagtgagattgcacttttatttcgagcatctgactcattggtccatgatttgtgccatgcttatgattcgtgccaggataaatcttcaactagaccccagaatttctttcttgctctccgtaaatggtatccatcccttcagccagacatggaatttcgatgttttgtacggaatcagaaattaattggaatttctcaacgggaggttaccactttttatcctgttttgcttgaaaagaagaatgatctcctttttctgatacaggcatttttcatcaatcatgtgagggctaaatttgagtcagaaaactacacatttgatgtttacattacaaaggatgacagagttaagattgtggatttcaacccttggggtgcatttacattgtcattgttgtttacatgggatgaattggaccatattcatagtgaaggaaatgatgtggagttcagaattgtggaagatcgttgtgctgttaggccaggccttaaaacagcagtcccatttgactacttggataccagcccggggagtggttgggatcaatttctaagaaatgcagatgaagagttaagacgacaatctacaggagctggtgcatga

SEQ ID NO: 292 - DNA, 1410 bp, Glycine Max
atggaagcgctaaaactgtgcaatctaacatggagcccgttgaagcacttctttcactctcacgcatttcgtcgaacacctcccgtgctcgttcttcgcgcgtgctcttcttccaccgccgccgccgacaccagggccgccggtcgcggacgccggagctcggagtcgtcgtccaccacttcgacttccgatagggacgccattcgagccattcgcttgaagaaggttgaagaattgagaagcaaggggcttgatccgtatgcttatgaatggaacaaaactcacggtgctaatcaactgcaagatatatacagagatctaggaaatggtgaggaaaaaaatagtgagaatgaccatgtatctgtcgcgggaagaattgttgctaggagggcatttggaaagcttgcctttctgactctaagagatgattcagggacgattcagctctattgtgataaggagagactcataggtgatcagtttgaacagttaaaggcccatgttgatattggtgatatattaggtgtaagaggaacaataaaacgaactgaaaaaggagaactttctgtgtctgttctatcttttgcaatccttacaaaatctctgcttccactgcctgacaaatatcatggactaactgatatagataaacgttatcgtcagaggtatgtagatatgatcgcaaatccagaggtagcggatgtattccgtagaagagcaaaggttgtatcagagatacggaggacaatggattctttaggttttgttgaagttgaaactccagttttgcagggagcagctgggggagcagaagccagaccatttattacataccataattctcttggaagagacttatatctgagaattgcaactgaattacatcttaagagaatgctggtgggtggttttgaaaaagtatacgagattggtcgaatatttagaaatgaaggaatttcaactcgacataatcctgaatttacaactatagagatgtacgaagcatactcggattatcaaagcatgatgaatttagcagaggagatcgttactcgatgtgctcttgcagttcatgggaagcttaccattgattatcagggagtcgagatatgtctggaaaagccctggaggagggagactatgcacaatcttgttaaagaaactgctgggattgatttcaatgaattggcaaatgatcttgaggttgcaaagcgagttactctggatacccttggaaagaatcttgataacaaggataaaggttccattgaagcatgccaatccgttggtcacctccttaatgaggtttttgagagttttgtagaaccaaagctcatccaacctacatttgttttagactatccaattgagatatctccactggccaaaccacacagaaggtttgactga

SEQ ID NO: 293 - DNA, 597 bp, Glycine Max
atggaaggaaactatctgaacagaaacagtactactccacagagagaggatagctttggttttgaggagcattcatggggaactccatggcctgctagaaactatgcttgtagcttttgcaagagagagtttaggtctgctcaagcattgggtggacacatgaatgttcacagaagggatagggcaagattgagatcatccttatcttcgtgggtttccgaatgccctaaacctaaccctaataataacccaactcttcttccaccaccctcttcttcttcaccatctcctttgcctgatgagcctttgaactatgcacatccttctccactttcttctaccagtggagacaagaaaccaagactcaccccttctcatcaatttcctcttttgattcctcaaagcgaaattaagatgatgagtatgaatacaaggagtgatttcattgctgatgaggaaatgaagggctgtgtggtggaggaggaggagcacaagggttttaagaataatgagcaaaacattacgttggagttaggaataggagtgcttaaacaccaagaggagaagttagatttggagcttcgcctcgggcattaa

SEQ ID NO: 294 - DNA, 960 bp, Glycine Max
atggaagggatagagcaccaaacactgaacgtgaatggcataaacatgcacatagccgagaagggtgaaggcccattgatcctcttcatccatggcttccccgacctatggtactcctggcgccaccagatcacagctcttgcctccctaggttaccgctgcgtggcgccggaccttcgtgggtacggcgacactgacgtgccggccaaccccacagcctacaccagcctccacgtcgtcggcgacctcgttgggcttctcgacgcgatcgtcggcgacgaggagaaggtgtttgtggtgggtcatgactggggtgcaatgactgcatggtctctttccctctatcgccccgaacgaatcagggctcttgttaacttgagcgttgttttcactccccgaaaccccaagagaaaaccccttgacactttaagagcagtgtacggaaatgactactatatctgcagatttcaggagcctggggaaatagaagctgagtttgcacagatcggcactgcaagagttctgaaggaattcctgacataccgcaaccctggtccactttatctaccaaagggtaaagcgtttgcacatccaactgattctcccatagcgttgccctcatggctatctgaagaagaatgtgactactatgccagtaaatatgacaagactggcttcacagggggattgaactactacagaaatttggatctaaattgggagctgacagcatcgtggactggtgctcaagtgaaagttccagttaagtttatagtgggtgatctagacctgacctataatgcaccaggagccaaggaatacattcacaaaggtgggttcaagagagatgtgccgcttctggaggatgtggttgttcttgaaggggctggtcactttctccatcaagaaaggcctgatgaaatcagcaaccacatttacgatttctttaagaaattctga

SEQ ID NO: 295 - DNA, 756 bp, Glycine Max
atggaattcgaggatcaagaggagcaggaggaggagctgtgtatgggtggtggagcgggctacgatccgacccagatgaagattccggttgcggcggagccggtgaggagcagcagcagcaacggcggtggctgcggaagggcgaggtacagggagtgtttaaagaaccacgccgtcggaatcggaggccacgcgctcgacggctgcggcgagttcatggcggcggggatggagggtacgctggacgcgctgaaatgcgccgcgtgcagctgccaccgcaacttccaccgcaaggaggcggattcctccgccgtggtctccctctccggcggggacccgtactttcttccccatcatcaccaccaccaccaccctccgccgccgcagttttcggggtactaccggcatccggcggggtaccttcacatggggggacaactccgttcggcggtgggggggacgctggcgttgccgtcgacgtccggcggcggaggaactcagagcacgcgtgaggaccaggaagacatttcgaacaaccctagtgcaggaggaacagggtccaagaaacggttcagaacaaagttcacagttgaacaaaaggacaaaatgcttgaacttgctgagaaactagggtggaggattcagaaacacgacgaggctgtggtccaagccttctgcgacgaaactggtgtcaagcgtcacgttctcaaggtttggatgcataacaacaagcacaccctcggtaagaagccctag

SEQ ID NO: 296 - DNA, 1035 bp, Glycine Max
atggacaaaggatggggactcacccttgatacctcttcctctcaatctcttccattattcccttccaacgataataagatgtttcctctcctcggattccccgtcaacctcagccgcgcctccaaggaagacgatgaaaaccgcaaagttgtcggtgaagttgacttcttctctgatagaaacaaacctacacctccaccctctcacgaccacaacgttaaacccaacatcgtcaagaaggaaatcgatgaaacacctcttcacattaatactggtttacaactccttactgctaacaccgggagtgaccaatctaccgtggatgacggggtttcatctgatgcagaaaataagcgagccaaaaccactgagcttgcacagttgcaggtggagcttcaacgcatgaactctgagaacaagaagctgaaagagatgctcagccatgtgaccggtaactacaccgccttgcagatgcatcttgtcacattaatgcaacagaaccagcagcgaacaggaagcacggaaaatgaggttgttcagggaaaggtagaggataaaaacgttggtgttggtggagggaaggtaccaagacagttccttgatataggtcccagtggcacagcagaagtagatgatcaagtttcggattcttcttctgatgaaagaacacgatcgagcacacctcagaaccataacattgaagctggagctagagatggtgcgagaaataacaatggtaaaagccagttgggtagggaagagagtccagactcagaatcacaaggttggagtcccaataagcttcagaaaatgaacccttccaaccctatggatcaatccactgcagaagccacaatgagaaaagctcgtgtatcagttcgtgcccgatcagaagctcccatgatcagtgatggatgccaatggagaaaatatggacaaaaaatggccaaggggaatccatgccctcgagcatactacagatgcactatggcagttggttgcccagttcgcaaacaagtgagtttttctgattga

SEQ ID NO: 297 - DNA, 1293 bp, Glycine Max
atggacaagtgggacaataaaccctcaagaaaacagcaccacagagaaaacccttctttctcttccactctacttgacgttatctaccgttccatcgacgaagatccaacggatgagaaggaagaagcccaactcatcttctacagagaaaccatgaggaatcagaaacagagcaattgtttcagagaagaaaaacctgaagctgagaaacacaactctcgcagggccaggaaggtggagaattggatggagaagaaagccaacgagaaggttgtaatggggagaaactcattgacggaatttgaacgaagaacgcgaagcaattcaatttcaaacacactctccatgtattcaagctcaacctcttctgagtcaagctctgttggaggcttctcttcttcagagtcagagtccttctatggagtgcaaaggccaaagccaattaaaaccagtgtttctgataaaaccaaaaccaaaacaaccttcgatgcttcacttcacagtcacaacttcaggagccactcttcccaaagccaaaagccaaagcatgagaacggttctggcaaaaccaagtccaaagccttgaaaatcctctatggtgagttgaagaaagcaaagcaaccaatttctccaggtgcaaaacttgctagcttcctcaactctctcttcacttcaagtggaaatgccaagaaagcaaaggtttcaacaacaacaacaacaacaactacgtctacttatcgtcccgtcctgatcccggttgcgacagatcgtactgctgatactaaatcagcagcacaacaacaacaacaacctggttccacttgttcatcagcatcttctttttcaaggtcttgtttgagcaaaaccccttcttcaagatcaggtgcaaaaaggtcagtgaggttttgcccagtgagtgtcatagtggatgaagattgtaggccttgtggtcacaaaaatcttcatgaaggtgaagagagcaatggaaagaacagaagtgaggaacttaggctgcatgtcatgcaggagagtcgcagggtggaggagttagcaagagacttgttgaagaattatcagaaaaagagtgaagtggagtttgatgatgtcatgcattatgaagatgaagaagaagaagaagatgatgatgatgtggctagttgttcaagttctgatctttttgagttggataatctatcagcaattgggattgaaaggtatagggaagagttgcctgtgtatgaaactacccatttcaataccaatagagccattgccaatggcttcattctgtaa

SEQ ID NO: 298 - DNA, 2022 bp, Glycine Max
atggactccaacttccccggtgcttcggaagaccagggcacaccgtatctctcagactcgcttggttttgcaaccatggaagacaacgacttctcagaaactgcaaagttcattagccagatcctcatggaagaaaacgttgaccagaagccattctatgactcactcaccttgcaagttaccgagaaatccttctacgatgctctcgccggcaacctacctctttctcccgatcaacaccccgttcttctcagtcccgaagctgaaaccaccaccaccaccaccaccagcagcagcagcagcagtagcaacaacaatttttcagatgaatattctcgtgagttgaagctccgttctccggattctatttctgtttctgcttttcagtttaaatctcaaccaccgccttcagttactgttagtgacgcagtctcagatttggattcttctattgccaaactcttagcccacaatattttcaatcatgttgattctgtttcccagtttagaagaggcttcgaggaagctagtaaatttcttcctccggggcctaaccttgtaactgctctacattcaaagagagaagaaccaatcaattcttttggagacaattcctatgggttgttgaagggtagaaagaatcaccagcgccaagagatagaaactagagaagaaggagaaggagagagaagtaacaagcaatcagcactttcccttgttgatgagagtgacctgtcagatgcttttgatcggctgttgcttcatgaaggaaacctgtgtgacgaacacattcgtttgacgagtggatcagtgaacgttgaggaacgagatggaggtaagggtcgttcaaagaaacaagggaggaggaagaaggaaacggtggatttgaggaatcttctattgatgtgttcacaatctgtgtatgccaatgacaacaggactgccaatgaattgctaaaacagattaggcaacactcttctcccgttggggatgcatcacagaggttggctcattacttcaccaatggcctcgaagcacgcttggttggggatggcacaagtgcacaaggaatgtatacttttctgagctctaagaacatcactgttgctgagtttctcaaggcataccaggttttcacttcctccagccctttcaagaagtttatacatttctttgcaaataaaatgattatgaaagcagctgcaaaggcagaaaccgttcatattattgattttgggatcctatacggtttccagtggccaatactcattaagtttttctcaaatagggagggtggacctcccaagcttaggatcacagggatagagtttccccaacctggctttcgccccgcagaaagaattgaggaaacaggtcaccgtctggctaactattgtaagcgttacaatgttccctttgagtacaatgccatagcatcgaagaactgggaaaacattcaggttgaagccctcaaaattcagagcaacgagctagttgctgtcaattgtcacttgaggtttgagaatttactggatgagtctattgaagtgaacagtcctagaaatggagtccttcatttgatcaggaagataaatccggatatttttactcagtccatcactaatggatcatataatgcccctttctttgccacgcggtttagggaggctctctttcattattctgctatttatgatttgattgacacagtcatacctcgtgaaaacgaatggaggttgatgcttgagagagagcttttgggcagagagattatgaatgttatagcatgtgaaggttctgagaggattgagaggcctgagacatacaaacagtggtatgttaggaatacgagggctggtttcaagcagctcccgctaaatgaggaattaatggccaaattcaggactaagttaaaggaatggtaccacagagattttgtcttcgatgaagataacaagtggatgcttcaaggttggaagggccgcattttgtatgcttccacttgttgggtgccagcataa

SEQ ID NO: 299 - DNA, 1593 bp, Glycine Max
atggactcttcttcttcatcaccgccaaacagcaccaacaacaactccctcgctttctctctttccaatcactttcccaacccttcttcctctcccctttctctcttccactccttcacctatccatctctctctctcacaggcagcaacacggtggacgcaccgcctgagcccaccgctggagcaggaccgaccaacctctccatattcaccggcggccccaagttcgaggactttctgggcggttccgccgcaacagccaccaccgtcgcgtgtgcaccgccacagcttccgcagttctccaccgacaacaacaaccacctatacgattcggagctgaagtcaacaatagccgcgtgcttccctcgcgccttggccgccgaacaaagcaccgaaccgcaaaaaccatcccccaagaaaaccgtcgacaccttcgggcaacgcacctccatctaccgcggcgtgacccgacatagatggactgggagatacgaagctcatctatgggacaatagttgcagaagggaaggtcaaagcaggaaaggaaggcaagtttacttgggtggttatgacaaggaggataaggcagccagagcttatgatctcgcagctctcaagtactggggtccaactaccaccactaactttcctatttccaactatgagaaggaactggaggagatgaagaacatgactaggcaagagtttgttgcttctcttcgtaggaagagcagtggtttctctagaggggcctctatatacagaggagtaacgagacaccaccagcatggccgatggcaggcgagaataggcagagttgccggaaacaaagacctctaccttggcactttcagcacccaagaagaagctgctgaggcctatgacattgctgctatcaaattcaggggattaaatgcagtaacaaactttgacatgagtcgctacgacgtgaagagcattgcaaatagtactcttcctattggtggtttatctggcaagaacaagaactccacagattctgcatctgagagcaaaagccatgagccaagccaatccgatggagatccatcatcggcttcatcggtgacctttgcatcacagcaacaaccttcaagctccaacttaagctttgccatacccattaagcaagacccttcagattactggtccatcttggggtaccataatactccccttgacaacagtggcatcaggaacactactagtactgttactacaactacttttccatcctccaacaatggcactgctagtagtttgacacccttcaacatggagttctcaagtgccccctcaagtaccggcagcgataacaatgccgcgtttttcagtggaggaggcatctttgttcagcaacaaactagtcatggtcatggaaatgcaagcagtggttcctcctcttcttctttaagctgttcaatcccattcgccacgcccatattttctctaaatagcaatactagttatgagagcagtgctggttatggaaactggattggacctaccctgcacacattccaatcccatgcaaaaccaagtctctttcaaacgccaatatttggaatggaatga

SEQ ID NO: 300 - DNA, 972 bp, Glycine Max
atggacttgatgagcgttgagtgtgtgtcatcctcggacggcatggatgaggatgagatccacgccaaccatcatcactctgagttttcttccacaaagcctcgcaatggaggcactagtaacatcaattctgtgggccccaacggaattgctccggcaaccagcgtccatgagttgctggaatgtcctgtttgtactaattcaatgtaccctccaattcatcagtgtcacaatggccacacactgtgttccacatgtaaaactagggtgcacaaccgatgtcccacttgtagacaagagcttggagatattaggtgtctggcactggagaaggtggctgaatcacttgagttaccttgcaagtactactcccttggatgtccagaaatctttccatactacagcaagcttaagcatgagacagtatgcaattttagaccatatagttgtccttatgctggatcggagtgttctgttgttggggatattcctttccttgttgctcatttgagggacgatcataaagtggacatgcacacaggatgcacattcaaccatcgttatgtgaaatcaaatccacgagaagtagagaatgccacttggatgctcacagtatttcattgttttggccaatatttctgccttcattttgaagctttccagcttggcatggcccctgtatacatggcattccttcgttttatgggtgatgaaaatgaggctcggaattatagctatagcctagaggttggggccaatggtaggaaactcatttgggagggtacaccacgaagtgttcgtgatagtcaccgtaaggttagggatagccatgatgggctcattattcaaagaaatatggccctatttttctctggtggggatagaaaggagctgaagctcagagtcacaggaagaatatggaaagaacagaattcagatgctggggtgtgcatgccaaatctctgtagttga

SEQ ID NO: 301 - DNA, 1350 bp, Glycine Max
atggagaaaagagggaatgtgttgatggagaagtatgagtttgggaagctattaggtcaaggaaactttgcgaaggtttaccatgcaagggacgtcagaactggggagagtgttgccgttaaggtgattgacaaggagaaagttctaaaaattgggctggtggatcaaacgaagcgagagatatcgattatgagactggttaaacaccccaatgttttgcagctttatgaggtcttggccaccaagaccaagatttacttcatcatagaatatgccaaagggggtgaacttttcaacaaggtagctaaaggtagactcactgaggacaaggcaaagaagtactttcaacaattggtcagtgctgttgatttttgccacagcaggggtgtttatcacagagatttgaagccagagaacttgcttttggatgagaatggagttctcaaggttgcggattttggattgagtgcacttgttgaatctcaccggcaaaaagacatgctgcatacaatttgtggaactcctgcatatgtggctcctgaggttataagtagaaggggctatgatggagcaaaagctgatgtatggtcttgtggagtgatcttatttgttcttttggctggtcatttgccattctatgatttgaatcttatgtcactgtataagaaaataggcaaggcggaatacaaatgtccaaactggtttccatttgaagtgcgcagactgttagcgaaaatccttgaccccaacccaaataccaggatatccatggcaaaagttatggaaaattcgtggttcagaaaaggattcaaacctaaatctggtcaagtgaaaagagaggctgttgatgtggctttagttgtttctgatcaaatttttggcttgtgtgagaatacaagtgctgctgttgttgaggcagagcaagcagtggttaaacctgcacattttaatgctttcaatataatttctctgtctgctgggcttgacttgtctggcctctttgctggcaatgttgaactggatgataccaaatttacatttatgagctctgcctcatcaatcatgtctaccatggaggatattgctcgcactttgaggatggagataattaagaaggatggagggttgctgaaattggagagatccaaggagggtagaaaaggaccactttccattgatgctgaaatatttgaggtcgccccatctttccatttggttgagctgaagaagtccagcggtgatacattagaataccagaagatattggaggacttaagaccagctctcaaagatattgtcggtgtttggcaaggtgagcagcatgcagtagcaaggttgtgtactccttaa

SEQ ID NO: 302 - DNA, 648 bp, Glycine Max
atggagaaaatgagagtggtactaattactctattgttgtttataggtgcagcagttgcagaaaaagctggtaatggcaaagctgccaataatcctgcagaagatgctagtgatggcgaagccattaatcttgtagaagaagctggtggtattggtgatgccattactcctgcagaaggcaaagccactaatcttcaagcgtatgagtcagctagattcaaaaagtttgtgacacattgcagctcacatgttgctcaaacatgcagtggaaatgatccattgcatcatcaggaaggtggccatggaataaacgttccacttgggttgtcattttgcctttttgattctatggagaaatgcttgggagaccatgaagccaaacttatagatcccaacccaggtcccatgtcggctattcctaattcaatccaatctcagcaactcctcattgagactgtaaaattcagaactgtcttgaaaacctgtactcgtgttagtgcacaattttgtttaactgctcctaacgttgatacatcggttttaccggcatgtctcgggccatctctcaatcaatgtgtttatcctgcagctgatgcatttacacctggcccgccgctcgaactcccacctattattatttataattag

SEQ ID NO: 303 - DNA, 2157 bp, Glycine Max
atggagaacacagatccttgtagacattttctcaaggatgttaagcgcatcataatcaaggttgggactgctgtggtcactcgccaagatggaaggttagctgttggaaaattaggggcactctgtgagcagattaaggagctgaattctcttggttatgagattattttggtgtcatcaggtgctgttggccttggtcgccaaaggcttagatacagaaaattaattaacagcagctttgctgaccttcagaagccgcaagttgaacttgatggcaaggcttgtgctgctgttggacaaaacagccttatggctctttatgatgttttgtttagtcagctggatgtgacatctgctcagcttcttgtgacggacaatgattttagagacaaagatttcagaatgcagctcagcgaaactatgaaatcattgttagcattaaaagttattcccatattcaacgagaacgatgcagttagtactaggaaagctccatatgaggattcttctggcatattttgggataatgacagtttatcagctttattggcattggaattaaaagctgatcttcttattttgttgagtgatgtagagggtctctatagtggccctccaagtgatccacgttcaaaacttattcatacatacattaaggaaaagcatcaaagtgaaattacttttggagacaagtctagagtgggaagaggtggaatgactgctaaagtaaaggcttctattcatgcagctgaagctggcattcctgttatcattactagtggttatgcagctgaaaatatcattaaagttctccaaggacaacggattggaaccctcttccataaagatgcacataaatgggccccggtaaaagaggttgatgctcgtgagatggcagttgcagctagggactgttccagacggcttcaggccttatcttcagaagagaggaaacaaattttgctaaaaatagctgatgccctggaagcacatcaaaatgagatcaggattgaaaatgaagctgatgttgctgatgcaaaagaagcaggatatgaaaaatccttggttgctagactgcttgcaagccttgctaacaacattcgaattattgcaaacatggaagatccaattggtcgagtgttaaaacgaactgagcttgcagaggggctgattttggagaaaacatcatcttctttaggagttcttttaattgtttttgagtctcgccctgatgcactagtacagatagcttctttggcaatccgaagtgggaatgggcttctcttgaaaggaggcaaggaggctaagcgatcaaatgcaattttgcacaaagtaattactgaagccataccagatattgttggctcaaaacttattggacttgtgacatcaagagcagaaattcctgagctacttaagttggatgatgtaattgatctagtgattccaagaggcagcaacaaacttgtcactcagatcaagagttccactaaaattcctgtcctgggtcatgcagatggaatttgtcatgtctatgttgataaatctgctgatctggagatggcaaggcggattgtactagatgcaaaaatagactatccagcaggctgcaatgccatggaaactcttcttgttcacaaggacttggtagagaaaggttggctcaatagtattattattgacctacggacagaaggtgttacattgtatggaggacccaaggcaagtcctttgttaaatattccaatggctcgtatgttacatcatgagtacaattcgttggcatgcacagttgaaattgtggatgatgtttatgcagctattgatcatataaatctttatggaaggcatgccactctttatttcttgataattgcacatactgattccgttgttgcagaagatcatgaagtagccaatgtgtttctacgccaagtagacagtgctgctgttttccacaatgctagtacaagattcagtgatggggcacgatttggactaggtgcagaggttggaataagtacaagcaggattcatgctcggggtccagtaggagttgatggattgttaacaaccagatggattctcaaaggaagtggacaaatagtggatggtgacaaagcagttaactacactcacagagacctttctatatga

SEQ ID NO: 304 - DNA, 1422 bp, Glycine Max
atggagaagctgccgaacctggtggaggacattgtgcagacatccttaaacactggtccaaggggtgtcctgaggttggctcaaggtgttcaggccttccttggggttggtcaggagtggttaactgatgtctctaagtcagcaaattcatttgctgggttaccgactgaactgcagcttggtttactctcccccttttatttgaggaggttgtttgagcgcatgggtgcaacctatatcaaattgggtcagttcatagcatcagcgccaacgctgtttccacctgagtatgtacaagaattccaaaattgttttgatagagctcctcctgttccttttgaggaaattgaatctatattgcgcaaggaattaggaaagccattagaaagtgtttatgaatacattgacccaacacccattgcttctgcgtctatagcacaggttcatggagcaaggctaaaaggctctagggaggatgtggttataaaggtcttaaaacccggaatagaggacatattagtggcagatcttaattttgtttatgttgttgctaggatattggagttcttgagtcctgaaataagccgaacatcactggttggtattgtcaaagatatacgtgagtctatgcttgaagaagttgacttttacaaggaggctgcaaatattgaggcttttaggagatatttagaaacaatgggacttactgggaatgcaacagctccaaaagtgtatcgatactgcagtacaatgaaagttttaactatgcaaagactatatggagttcctcttactgacctagactccataagttcattagtttctaatccagaaaccagccttataactgctctcaatgtgtggtttggaagtttgcttgcatgtgaatcttttcatgcagatgtacatgcaggaaatctgtggcttctacgtgatggccgtattgggtttcttgacttcggaattgttggtcgtatatcccctaaaacatgggctgctatggaagtcttcttaggatcaattgccattgaagattatgactcaatggcatcttccttaattgaaatgggtgctacaaaccaggatgttgatgctaaggcctttgcaagagatttggaaaaagtattctcatcaattaaggaattggacactgaaatagttgtagcaactacaactggaacagccacaaatgcaactgctgttgctgctaatatagttgttgatgagaggcagatgaatgcactctttcttgatgtggttcgggttagtgaatcatatggattgaagtttcctagagaatttgctcttctcctgaaacagctcttgtactttgaccggtacacacggttgctggctcccaacttgaacatgcttcaggatcagaggatttccattgcttccaatagcagaagcagggtatag

SEQ ID NO: 305 - DNA, 957 bp, Glycine Max
atggagagcaccgaagactcatccacgagttcacaacaacaacaaccgaacctgccacccgggtttcggttccaccccacggacgaggagctcgtggttcattacctcaagaagaaagttgattctgttcctctccctgtttcaatcatcgctgatgttgatctctacaagtttgatccatgggaattaccagccatggcatcgtttggggcggaagagtggtactttttcagcccgagagaaaggaagtacccgaatggcgcaaggccaaacagggctgcaacttcagggtattggaaggccacaggtacagataagcctatatgtagtggaactcaaaaggttggggtgaagaaatctttggttttctatggagggaagccaccaaaaggggtcaaaactgattggatcatgcatgagtaccgtgttgctgaaaacaagcctaacaataggcctcctgggtgtgacttgggccacaagaaaaactccctaaggctggatgattgggtgttatgccggatctacaagaagggtaacacacaaaggtcacatgagagggatgattccatggacgacatgattggagaagtacctccttccatcaacgtgggccacatgaatgcgaggtttcacctttcaaagatgtccacgagctacagtggtgcattgttggaaaatgacagaaacacgttagaaggtgtggttataggcaatggtaatgtcaatggaatcaacactaattcaataaatgccatatcatcatcatcatctcatcatcagtttgcctcctcaaactccaaggcagagcttcttccttttgccccttcaaacaacaacacttctaattcagcctccaaaagaacactctcatcactctattggaataataataataatactaatgatgggttacttcgaacaccatatcaaatacaagggaccaattggtatggttaa

SEQ ID NO: 306 - DNA, 2181 bp, Glycine Max
atggagagcgacgacgacttcgaccttttgcctccctcccccatccaagaacgaaagctgaagcgattgaagcaagcagatagggttcccgaaccttctcaccttcctatctctcctcccaatttttccgaatcaggaaacggcgaagaacacttgacgcagtcaaacggcagatctgggcctgaaattgaaactttagccacaagcccgagcccgagcccgagctctcaatctgacactccgaaaggtgtaactgtcgacgacgatggtttggtcgcgaaaagggctctggattttgattctttgagtgaggaacacgggaagattgccgaggagagtgaagaagttagggatctgaagaccaacgaagaaatcggtgatttgaataccggcgaagtagagaggaaacgacgtagtttagatgacttaccagagaagaacggaaagaagaagaagagaatcgaccacgacggtgatggtagtgagaagaagcctaacgaatctgccaccaataagagaaagaccgagaaggaacgacgagatactctgaaacagcttcgagcggagtctcataggcttcttcgagaaactagagatgcagcttttaaacctgctcctctggttcagaagccaatttcttcgatcttggagaaaattcggcagaggaaattggagattttacagaaatctgctgataatgtagaaaaggctgggccagaagaaacaccagctacttgccctgcagccactaggactaatttggacacgtcacatattggtgaagaatctaatgatgctgcagctagttctaactctcggagcattccttctcccatgctagtttatctgatacttgtttccctcatgttgagatgccattgccatttaattcactgtattgttgagtttcagaccaaggattcagaatctgagcatgcatttcgagctcctattgatgaggctgtaaatgagaagtctaacaacccttccgaagaagtgtttgccccattgatgcttgcaatgaacttgaagcttgattctgctcctcctgatgattatgtctcttccgatgaggaggaggaagacaatgacaaggagaatatagagccatgtgtacatgtatcagttgactcgactttaccaccaaatggtgaccctgttagggcttttgttgatgaagaagcagaagaggaagatgacagtgataatgaactacaacttttccaagatgatgaaggtgaagaagatgatgatgatattgaggaagatgatatgattgccactcaatatgaagaaaagccagatgatagagaaaagcatgaccaactccaccagcagtggcttgagcaacaggatgcagctggaatggataatctacatcagaaattcaattgtggttcaaaattgaatgaaacaccatcaactgaagaggaagatgaggaaagcagagaaactgtaaatgatgatgaagctgaagaatacactgcaccatcaaaaagtctgagggtcactctgaaaaaggtgaagcagatgatcccgcagatgttttcagataaagatgataaatatgtatcatctgatgatgaagaaactgaggacaagctagccagacaatccctctattataaaactgaggaaaaagctaaattcttttcaccaggtgaggacgaaaatagcagggaagttttcagtctaataaagaaatttaatgtgcccgatatcaagagaaaaggaaaaactacttccatctttgctatgccgagcattggacagaacataaatatatcatcaaagtcatcttttgttggccgggcttcagatcattttatgcccacttctcgaaagcagggatcatgtaaggtccgatcatatatatttgggcgagatgacagcaacagcaggagttcaatattgatgtcagaggattcttcagatacgattcaaacggagagtcaaccaccaaaagcggcttctgccaagtttcaaagaaatatgcagaacaaaaacaccaccttgaattctgcatctaaagagtctagtgtgtcacttttggatatattaaggaagtctttacatcatgcagatcacagttttcagaatgtcaacgttcaaccaaagacatcaatatttgatgcattcaagttagtgaagaagccaaccaaggcggaggcaagagtttga

SEQ ID NO: 307 - DNA, 3828 bp, Glycine Max
atggagccggaagtgagcatcgagggatcggcgatgatccaggtggcggtggttccaatcggagcggtgccggcgaacgtgctgcgggactactactctatgctgctcccgctgcacacgatcccgctctccgcgatcagctccttctacaccgagcaccagaagtcccccttcgccgtccagccctgggactccggctccctccgcttcaagttcgtcctcggtggcgcgccgccgagtccatgggaggacttccagtcgcaccgcaaaaccctcgccatcgtcggcgtcgtccactgcccctcctcccccgatctcgaagccgtcgtcgacgtcttcgccagtgcctgcaagtccttcccttcctccctcgtcgatcgctgtttcgccttctgcccaaacgatacgcagcttgaggatggaagtaagaaaggtgggaatttgaggttgtttcctcctgcggatcgtccgactttggagttccacttgaatactatgatgcaagagatcgctgcgtcgctgcttatggagtttgagaaatgggtacttcaagcagaatcttctggaaccattctcaagacgcctttagattctcaagctagtctcagctcagaggaggttatcaaggccaaaaagagaaggcttgggcgtgcccagaagaccattggtgattactgtttgctggctgggtcccccgttgatgccaatgctcattattctactgcattggaactttcgaggttaactggtgattacttctggtatgctggagcattggagggtagtgtttgtgccttgctgattgaccgtatgggccagaaagattcagtcctggaagacgaagttagatatcgttataatagtgtcatcttgaattacaagaagtcacaagataatgctcagcgagtttctcccctaacttttgaacttgaagctactttgaaattagcaaggtttctttgcaggagagagctggccaaggaggtggtggagttgttgaccactgctgcagatggtgctaaatctttaatcgatgcaagtgataagctcatattatatattgaaatagctcgtctgtatggaagtcttggataccaaagaaaagctgcattcttctcaaggcaggttgcacagttatatctgcagcaagaaaatagactggctgcaattagtgctatgcaagttttggcaatgaccacaaaagcttatcatgttcaaagtagatcatcaatctctgatcattctttgcacagtgaccttgggagaaccacaccacaaaagcaagttgttggggctggagaacccaaactcttaaagccttctaaaaatcccacactaggatcacatatgtccaatgtgaaacttaagtcccacaggacccacaccttgaaattggatcataaagtccgatcatgctgcatagtcctgatgcccacacaagatgtctatgcactagcccttttactagtctcagtcgaacactgcaatggcatcatcacttgcacagctcgttttgggaaaacatatcaccaatcagcagtctcactatttgagtctcaatggagtaccctccagatggttgtgttaagagaaattctgctctctgctgtccgtgctggtgatcctcttactgcatggagtgcagcagcacgacttcttaggtcctactatcctctaataacacctgctgggcaaaatggccttgctaatgcactttcaaattcagctgagaggctgccaccagggactcgttgtgctgatcctgctttaccctttgtgaggctgcattcctttcctctccacccaacacaaatggacataataaagcgtagtactgctagagaagactggtgggcgggtgctgctccttcaggccctttcatttatacaccattcagtaaaggagagcctaataatatcaagaagcaagagcttatttggattgttggagagcctgttgaggtcttggtggaattggcaaacccatgtggctttgatttaagggttgatagcatctatctatctgtgcattctggaaattttgatgccttccctgtgagtgtaagccttctaccaaattcttcaaaagtgatctccttatctggcattccaacatcagtggggccagtttcaattcctgggtgcattgctcattgttttggtgttattactgaacatctgtttaaagaggttgacaatctgcttcttggggcctcacaagggctggtcctttctgacccttttcgatgctgtggatctcctaagcttaagaatgtgcctgttcctagtatttctgtagtaccaccacttccattgttgatatcacatgttgttggaggtgatggtgccatcattttgtatgaaggcgaaattcgtgatgtgtggatacgcctggctaatgcaggtactgttccaattgagcaggcccatatttccctgtcagggaaaaaccaagattctgtaatttcatattcttctgagactttaaaatcttgcctccctttaaggcctggagcagaagttacattccctgtgaccttgagagcctggcaggttggcttggtggatgctgatgctggtgcagggaagactgtctctgggaacaatatgaggcattccaaagatggaagcagcccatcactgttgatccactatgctggtccaatgaaaacctctgaagatactccaacaaatggatctactgtgccccctggcagacgccttgttgttccactgcagatttgtgttttgcagggtttgtcttttgtgaaggctcagcttctttcaatggagtttcctgctcatgtcggtgaaactcttccgaagttggatgacttaaataacaagtctactgatgttgaatcagaaacaaaaatggacagattggtgaaaatagatcctttcagaggaagttggggactgcgattccttgaacttgagttatctaatccaactgatgtcgtgtttgaaatcaatgtctctgtcaaactggagaactctagcaacgaggacaatcattttgctgatcagggtgctacagaatatgtctatcctaaaacaagaattgatagagattgctcagccagggttctagtgcctcttgagcattttaaattacctgttcttgatgactccttttttatgaaggactcacaagcagatgggaatggcggaggaagaaatgcatccttttctgaaaagaacaccaaagctgaactcaatgcttgtatcaagaaccttatatccaggattaaggttcaatggcattcaggacggaatagctctggagagttaaatatcaaggaagctatcctggcagctctccaaacttcggtcatggatgttttactgccggatccattgacatttggcttcaggcttgttagagatggttctgaatcaggaaaaccttattctgataaagattctgaattagttgaatctcctgcttccaaaggttctgtgattgcacatgaaatgacaccaatggaagttctggttcgcaataacaccaaggatatgatcaaaatgagtcttaatattacatgcagagatgtagctggggaaaattgtgtagatggtaccaaagcaactgttctatggactggtgttctgagtgatattactatggaaattcccccacttcaacaaattaaacactctttctgcctacattttcttgtccccggagagtatacattacttgctgcagcagtgattgatgatgcaaatgacattcttcgagctcgtgcaaagaccacttcagctgctgagccaattttctgtcgtggaccaccatatcatgttcgtgttcttgggactgcctga

SEQ ID NO: 308 - DNA, 4096 bp, Glycine Max
atggagctggagctgaagactccaacaagtttgatttttggtgttaatggtgagaagtttgagctctacaacgttgacccttcaatcactttactcgaattcttgcgaaatcacactagtttcaagagtgtcaagctcggctgtggtgaaggtggttgtggtgcttgcgtagttttaatctccaaatatgatcctgtgcatgacagagttgaggattttacggcaagctcttgtctcacactactttgcagcatacatggatgttccataacaacaagtgaaggcattggaaacagtaaagatgggttccacccaattcatgaaagaattgcaggattccatgccactcaatgtggcttctgcactcctggaatgtgtgtttccctctatggtactcttgtcaatgctgaaaagaccaatcgtccggagccaccttctggattctcaaaagtgactgctgctgaggctgaaaaggctattgcagggaacctttgccgctgtaccggttacagacccattgctgatgcctgcaaaagttttgcagctgattttgatatagaggatttggggctcaactctttttggagaaagggagagggcaaggacttaaagcttagtaggttgcctcagtatgacaaaaatcataatagtattagatttcctttgtttttgaaggaaatcaagcctattgtgtccttggcttcggagaaatactgttggtacagtcctactagtctagaggagcttcagagaatattggcgctaaaccaagtcaatgggacccggatgaagcttgttgttagtaatacaggtatgggatattacaaagataatgaagtctatgatatgtacgttgatctaaggggcatttctgagctctcaaagatcagaaaggattggaaaggaattgaaattggagcaacagtgacaatatctaaagccattgaagcactaaaggaagagagcaaaggtgactttctctcagattatgtaatgatacttgaaaagattgctgaccatatgaacaaagttgcctcaggttctattaggaacacagccagtgttggtggcaatctagtgatggcacaaaagcatcattttccctcagatattgccacaatacttcttgcagtggattcaatggttcacataatgactggtacacaatttgagtggctgacattggaggagtttctggaaagaccaccattaagcttggatagtgtgcttttaagcattaaagttcctagtttggaactcaataaacgtgaatcctcagaaccagaaagtagattcttctttgaatcttaccgagcttctcctcgaccccttggaaatgcccttccctacttaaatgctgctttcctggctaaggtgtctccttgcaaggattctggtggaactgtgatagacagttgtaggttgtcttttggtgcttatgggactaagcatgcgataagagcaaaaaaagttgagaaattcttaactggaaatctgttaagtgttagcattctatatgatgctattaacttggtcacagacactattgtacctgatgatgacacctcacaaactgcttaccgttcaagtctttctgctggttttatttttcagttctttaacctattgattggcagtcctgagagaataaccaatggttatttaaaaggacatactaatctgtcatctgtggaggcttttgaattatcaaagaatcagaagcaggttcatcatggcaaatttccagccttactgtcatctggggagcaggtccttgaagcaggtactaagtatgaacccattggtgagccagtcatcaaatctggtgctgctctacaagcttcaggtgaggctgtgtttgttgatgacattccatcaccaaaaaattgcctacatggagcatatatctatagttcaaaacctttagcaagggtaaagagtataaaactcagccccgaattggaactggatggagtgagggatatcatttcaagtaaagatattcccaatgggggccagaaccttggatcaaagactagatttggtgacgaacctttatttgctgaagagatagctagatgtgtcggtgatcgtctggcctttgtggttgcagatactcagaaaaatgcagatattgctgcaaactcagctattgttgattacggtcttgaaaatcttgaaccacctattctaactgtggaagatgctgttaaaagatctagcatttttaaattacctccttttctctccccaagtcaagttggtgatgtgccaaaaggaatggctgaagcagatcacaagattctttctgctgagttgacacttgggtctcaatactatttctacatggagacacaagctgcccttgctgtacccgacgaagacaattgcattgtggtttacatttcaagtcaaagtcctgagtatgttcattctaatgtagcaagatgcctaggtattccagaaaataatgttcgtgtcattacaagaagggttggtggaggttttggtggaaaggccttgagagccacagcatgtgctacatcatgtgcattggcagcacacaaattgcggcgcccagtcaggatgtatctaaatcgaaagacagatatgataatggctggaggaaggcatcccatgaaaataacttacagtgttggtttcaagaatgatgggaagattacagcattagatcttaagatattggtcaatgcagggatatatgtggatgttagtccaataataccacgcaacatgattggtgcacttaaaaagtatgattggggtgctctctcttttgatataaaactatgcaaaacaaaccatcctagtagagctgcaatgagagccccaggggatgcgcaaggatcatacattgccgaagctataatagaaaaggttgcagccacactttcaattgatgtagattctgtaaggagcattaatcttcacacatacacaagtcttaaagcattctacgaggactcttctggtgagcctcatgagtatactatgcctttaatatggagtaagttaaatgtttctgcaaactatgaagtgagagttgaaatggtgaaagagtttaacaggattaacacttggaaaaaaagggggatttctcgagtgccagtgttgtatgaggtgaatgtaaaacctactacaggaaaagtcagtattttttcagatgggtctgttgttgttgaagttggaggaattgaattgggtcagggtctatggacaaaggtgaagcagatggctgcatttgcacttggtgcagtgcaatgtgatagaattgatagtcttttggacaaagtaagggttgtgcaaactgatacggtgagcttgattcaaggggggttaactgctggaagcacaacatcagagtcaagctgtgaagctgttaggctttgctgtgatatcttggttgaaaggttaaagcccctcaaggaaaaactacaggaggaaatgggttctgtcaagtgggagacgcttattcagcaggcatacgcacaaccggtgaatttatcagcgtcttcattttatgtacccggtaacaattccattaggtacattaattatggtgctgcagtaagtgaggtggaaatagatcttctgactggagaaaccagatgtttgcagacagatattatctatgattgtggacagagtctcaacccagctgtggatttaggacagattgaaggagcttttgtccaggggttagggtttttcatgcttgaagaatacgaaacaaatcttgatggtttggtgttacaagatggcacttggaactacaaaatccctacgatagacactatacctaaacagtttaatgttcaaatcctcaacagtgggcaccaccagcaacgtgttctctcttcaaaagcttctggcgagccgccattacttctagcagcttccattcactgtgccacaagagcagctgtaaaagaagcaaggaaacagcttctttcatggagcaaccaagatggagaagattcaacatttcagttgggagtccctgcaaccatgcctgtggtcaaggaactctgtggactggacattgtagaaagatacttgaaatggaaaatgggaa

SEQ ID NO: 309 - DNA, 3153 bp, Glycine Max
atggagctgtcgactccgaattcttcctcgaagcacttgtccattacgccgggttctagggttttgagaaaccctctctccgacgaacagatctggaagcgcctccgtgacgctggcttcgatgaggaatcgattaagcacaaagataaggctgcgcttattgcttacatcgccaagctcgaagctgagatatatgatcaccagcaccacatgggccttctcatattggagaaaaaggatttggcttcgaagtatgagcaagtaaaggccttggctgaatcatccgagttaatgcataaacatgattcaaccatgaataaatctgcgttaactgaatcaaagaaacgtgaagaaagtttgaagaagacagtaagcatcaaagatgcatgcatagcaagtcttgagaaggccttgcatgagctgcgtacagaaagtgctgaaacaaaggttgcagctgagagtaaatttgttgaagcacgccaattaatagatgaagcacagaaaaaatttacagaggctgaagccaaggtgcgtgctgctgaatctttgcaggcagaggctaagcgatatcacaatgttgcagaaaggaagcttcatgatgttgaagcacgtgaagataatctcaggcggcaaatcatatctttcaagtccgattgtgatgaaaaagataaggagatgattattgagaggcaatccctttctgaaaggcaaaagggtttgcaacaagaacaggaaagattacttcaatcacaatccttgctgaaccagagagaggaacactttttgagtaggtctcaggaactgaatcgtcttcaaagagagttggaggacacaaaagtgaaatttgaaaaggaacatgaagccctatatgacgagaaaaccaccctaaaactgaaggaggcaaccttaatacaacaagaagaggaacttgctaaatggaaatctgagctgagcaagaaagaacaagagttacttgaatttcaagcgaaactttctaatagagaatctgataaaacacagaaagttgttgctagtcaggaagccgcactgagaaccaaaaaatataacttggaagttgagctgcaaatgcagcgcaaattggttgaaaatgaaattgaggaaaagagacgggcttgggagttgaaggaggttgatcttaaacattgtgaggatcaaatcctggaaaggcagcatgagttggaagttctgtcaaggtcgctgagtgagaaggagaaggatctgaaggacctgtcaagtgctcttgaagaaaaagatcaaaggttgagtgctgctgagaaggactttgagttaaataaagtgcttttgcagaaggagaaagatcatgttgaacaggcaaaacaagatgtgcagaagtctttggaatcattggaagataaaataagacaagttgatatggaaaaggagaaactggaagccatgaaaagtgaaacgggtgacttgtcaattttggaagtgaaactaaaggaagagattgaccttgtaagatctcagaagttggagcttttggctgaggcagagaagctgaaagctgagaaggcaaagtttgaagctgagtgggagcttcttgatgaaaaaaaagaagagttgcgggaagaagcagaatttatagcaaaggaaagggaagcggtttccacttttattaggaatgaacgtgaccaactaagagaagagaaagaaaatctgcacaatcagtacaaccaagatctggggtttcttgctagtgaacgagaaaagttcatgaacaagatggcacatgaacatgctgaatggtttggcaagatgcagcaagagcgagcagatttcttgcgggaaattgagttgcaaaagcaggagctgaataacctcattgagaagagacgtgaagaggtggaaagttatttgaaggaaagagaaaaggcttttgaggaagaaaagaacactgaacttcagtatattaatgctcttaaagagaaagcagcaaaagagttggaacaggtttccttggagatgaaaaggcttcagactgagcgagctgagataaatttggatcgtgaacggagaaatagggaatgggctgaacttactaactgtattgaggaactcgaggttcaaagggataagctccaaaagcagagagaactgttgcatgctgatagaattgaaatttatgctcagactgaagaattgaaaaaactagaagatttgaaagctgtctctgatgataatgctatcactgaaatgcttaaatctgatatggagtctaaccaaaagaaaatctctgcaaggaagaacttgaagcatcaatctcttacacatggtggtgatagaatcagcaatgggtttgatactccacttgtgcagaagtcaactgtttctcctcctagccctgttcgattctcatggataaaacgatgcacggagctaattttcagaaattctcctgagaggccacttgagagaaacgaggattttctcatgggttctgatacaggtaatgttagtaacctgaaaaagcacttggaaaatgacgaaccacttggtaatattggcaagagacaggaaataggatttgctcttgaagaaccaaaagtaatagttgaagtaccctctctagatgatgctagaagaagtgagattgaatctgaggctaaagatgtgaatggaaaaagtgctctcctgattccagatggacatcgtgcaggcagactaaaaagaaggagggggaacatgactgataaagttggcaatccatttgtagatgtggggcaaaataagaaatcgagagcagaagaacaaaccaatgaaaaggtccaatcaggtgtgtctaaggtccagcaggtgttaacgtcatcaaatcaaacacaagggaacacggaagaaactcgtgtagtaataatggttgataaggttattcatgtatcagaagtgacttccgagaaacttgatgttctccctatcctcagtcaagaaccaagagataatttcccgagtcctacattgggagcagatcaatgtaatcttcatggagaaacaattgatcaatcaaattataaaactagacaggaagatgttttgccttgtgcttctagtgtattgggaagcacagaagaaatatccaaaggaaacaatgaacaggtttctgagcactgttag

SEQ ID NO: 310 - DNA, 1674 bp, Glycine Max
atggaggagatgtcctttattgttgtggtgccattaagagtaggtaattgtaattgtaattcagtctgtgataacccaaccatagttccccacatggatgtatccagatttaagctgatggcggacacggggttgttatctaattctgtaactaaggttttcaccgagacagttgcaagtttggatgattgtcatgatagtggcaatttggaggatgaagttggtattgctgaagtcataccaccaaaacaggatagggagggagagagtcctatgttggatacaatatcccaaaatagaagcactttggctgctggcgatgaagagttaaccacggaaattgaggaggattcattgtcgttggaaggtgaccagtttgttgatagctcgtgttctctttcagtagtcagtgagaacagtagtgtgtgtggagaggagtccttctgttttgatgctacttcggatgttgggacaccgtgttccgcagacgtagagaagagcatcagtgctgtcaatattgtagctgaggctgttgacttgggggagtcaaatattgacccagatattatgactgatcctcttgctgtggcagtgagccttgaagaagagactggagttagatctggcccaaagtcttctgctgttgatcttcatcagttgcctcaggaaaaaggggtgagtggaacagttggtcggagtgtttttgaattggattataccccactttatggattcatatctatgtgtggaagaagacctgagatggaagatgcagttgcaactgtacctcagtttctgaaaattcctattcacatgctaattggtgatcgggttattgatggaataaacaagtgttttaatcagcagatgacccatttctttggagtctatgatggtcatggtggctctcaggttgcaaactattgtcgtgatcgtatccatttggccttgactgaggaaatagaatttgtaaaggaagttatgatcagtggaagtatgaaggatggttgtcaagatcagtgggaaaaatctttcaccaattgtttcttaaaggtcaatgctgaagttggagggcaatttaataatgaacctgttgccccggaaactgttggctccactgctgttgttgctgttatttgtgcatctcatatcatagttgcaaattgtggtgattcacgagcggttctatgtcgtggcaaagaacccatggcattatcagtggaccataaacctaaccgagacgatgaatatgcaagaattgaggcagctggaggaaaggtgattcaatggaatggccatcgtgtatttggtgttcttgcaatgtcaaggtctattggcgatagatatttgaagccatggattattccagaaccagaagttacgtttgttccccgtacaaaagatgacgagtgtctcattctggccagcgatggtctgtgggatgttatgacgaatgaggaggtgtgtgaccttgctcggaaacgaataattctctggtacaagaaaaatggcttggaacaaccctcatcaaaaaggggagagggaattgatcctgctgcacaagcagcagcagaatacctatcaaaccgtgcccttcagaaaggaagcaaagataacatcactgtgattgtggttgatttgaaaccctatagaaaatataagagcaagacatga

SEQ ID NO: 311 - DNA, 744 bp, Glycine Max
atggaggctagcatcatggatggtccaaaacgacgatgcggcgccgtttcgggtcttaccaccgttaagaacccgatctcgcttgctcgtttggttatggacaaatccccgcattcctacctcgccttctccggcgccgaagaatttgctaggcaacagggtgtggaggttgtggacaacgagtactttatcacacctgacaacgttggcatgctcaagctggcaaaggaagcaaacacaatcctgtttgattaccgaatcccaacatcggggtacgagacgtgcggatccggtgtggagagtccactgcaaatgaatggactcccaataagcgtgtacgcgcccgaaaccgttgggtgcgtggtggttgaccgggagggccggtgcgcggcagcaacatccacgggagggctgatgaacaaaatgaccgggcgcatcggtgattcgccgctgataggcgccgggacctacgcgtgcgacgtgtgcggcgtatcgtgcacgggtgaaggcgaggccatcatacgtggcacgctggcgcgtgaggtggcagcggtgatggaatacaaaggcttgaagcttcaagaagccgtggattttgtgatcaagcaccgtctcgatgaagggatggctggtctcattgctgtgtccaacgctggggaagtggcttatggtttcaattgcaatggcatgtttaggggctgtgccactgaaaatggcttcatggaggtcggaatctgggaatag

SEQ ID NO: 312 - DNA, 2073 bp, Glycine Max
atggaggctccacaaggtggatccggatccggacccgagcgagacaaatccaccgctccctcctcttctccgatctccgtcgtctccgccttctggaaagattttgagttggagaaggagaaatctatactggatgagcaagggcttcgaattgctgagaaccaggaaagcagtcagaaaaatcgccgcaagcttgccgagaacactagagacttcaaaaaggcttcgcctgaggataagttaagtttgttcaattccttgcttaagggctatcaggaagaggttgacaatcttacgaagagagcaaagtttggagaaaatgcttttctcaacatctatcaaaagctctatgaagctccagatccttatccagctcttgcgtcaattgctgagcaagatctcaagatatctgagcttgaatctgaaaaccggaaaatgaaagttgagcttgaggagttcaggacagaggcaactcacttgaagaatcagcaggctacaatacgacgacttgaagagagaaacaggcaattagagcaacagatggaagagaaagtgaaagaaattgtggagattaagcaacgcagtctggcagaagagaatcagaaaacattggaagttttgaaagaaagggaacaggcactgcaagatcagttgcagcatgccaaagacagtgtctctactatgcagaaattgcatgaactcgcacaaaaccagttgtttgaactccgtgcccaatctgaggaagagagggcatctaagcaatcagaagtcaatcttctgatggatgaagtggagcgtgcacaatcaatgcttcttagtttagaaagagagaagggggttctccgatctcagttacaaacggcaaatgaagagactgaaactaagaatagtgataattttgactcaaatagtgcacttgagaattctttaaatgccaaagaaaagcaaatctctgaattgaacatggagctacacaatattgaaacagccttatcaaatgaaagagatcaacacattaatgaagtcaagaaacttactgcaatgctcaatgaaaaggaggctgcccttgaggagatgaagaaagaacttaaagcaaggccaacagaaaaaatggttgatgatctgcgcaagaaagtgaaaattttgcaggcagtgggttataattcaatcgaggctgaagactgggaagtggctacaagtggggaagagatgagcaagatggagtctcttcttcttgataagaaccgtaaaatggaacatgaactaacacagttgaaggtcacactttctgagaaaacatccttactggaaacagctgaacagaagatagcagagcttacagcaaaggttaatgaacaacaaaaattggtacagaagttggaagatgatattttaaagggatatagttccaattcaaaagatcgtaaagggaacttccttgatgattgggatctttcagaagctggtgggggtgaggtttctgagaatacagaccaaaggcaagtatccttagaccaagatcagagctcaatgcttaaagtgatttgtaatcaaagagatcgatttaggacccgcttgcgagagacagaagaggaaataaggcagttgaaggagaagattggggtattaacagtggaactggaaaagagcaaagctgataatgtcaaactatatgggaagattcgttatgtacaagactataatcatgagaaagtgatttctaggggttctaaaaagtatgctgaagatcttgaaagtggtttcgcgtcagatgttgaatctaaatacaagaagatatatgaggatgatataaatccttttgctgcattctcaaaaaaggaaagggatcaaagatacaaggagttgggattcagggacagaattacacttagcagtggacgttttctccttggcaacaagtatgcccgaactttcgcattcttttataccattggattgcatatcttggtcttcacctgtctctaccgaatgtctgctctcagttatcttagcaatggcccagaggaattccttgttggagagaaaaacgttgatcttccgcgtggaccctag

SEQ ID NO: 313 - DNA, 816 bp, Glycine Max
atggataaatcagagcagactcaacagcagcagcagcaacaacagcatgtgatgggagttgccgcaggggctagccaaatggcctattcttctcactacccgactgcttccatggtggcttctggcacgcccgctgtaactgctccttccccaactcaggctccagctgccttctctagttctgctcaccagcttgcataccagcaagcacagcatttccaccaccaacagcagcaacaccaacaacagcagcttcaaatgttctggtcaaaccaaatgcaagaaattgagcaaacaattgactttaaaaaccatagccttcctcttgctcggataaaaaagataatgaaagctgatgaagatgtccggatgatttcagcagaagctccggtcatatttgcaaaagcttgtgaaatgttcatattagagttgacgttgcgatcttggatccacacagaagagaacaagaggagaactctacaaaagaatgatatagcagctgctatttcgagaaacgatgtttttgatttcttggttgatattattccaagagatgagttgaaagaggaaggacttggaataaccaaggctactattccgttagtgggttctccagctgatatgccatattactatgtccctccacagcatcctgttgtaggaccacctgggatgatcatgggcaagcccattggcgctgagcaagcaacactatattctacacagcagcctcgacctcctgtggcgttcatgccatggcctcatacacaacccctgcaacagcagccaccccaacatcaacaaacagactcatga

SEQ ID NO: 314 - DNA, 849 bp, Glycine Max
atggatacttgcaagaagtcccctttgaagccatggaagaaagggccaacaagggggaaaggcgggccccagaacgcctcctgcgagtaccgaggcgttcggcagcgaacttggggcaaatgggttgctgagataagagagccaaagaagagaaccaggctctggcttggttcttttgccacagctgaagaagctgccatggcttatgatgaggctgctaggagactctatggtccagatgcataccttaatctcccccacctgcaacccaggtccacttcaactatcacgtcaggaaagttcaaatggttcccttccaagaacttcatttcaatgtttccttcctgtggattactcaatgtaaatgctcaacctagtgttcatttaatccatcagaggctgcaagagcttaagcgaaattcagttgtgagtcaatcctcatctagttcatccaatgatccaaaggcagaaattcagaatgtagacagcaaaaatcacggagaagatgaaaatcctccaaaagatgttcaaacatcatcagaggaggtgcttggagatcttcaggagaaaccccagatagacctccatgagtttcttcaacagatgggaatacttaaagaagaaagacagtcagaaagaactgatagctcaggaagttcaacagtgcgtgaagctgtgttgacagatgactgtgatcatttgggagtgttttctgacaagagtgttaactgggaggcattgattgagatgcatggacttgcaggtattcaggaatcagaagtcactcagcttgaagcatatgagccaaatgatgatctaactttctcaacttccatttggaacttttaa

SEQ ID NO: 315 - DNA, 1101 bp, Glycine Max
atggatagctactaccatcaacaccacaaccctcactttgacaacaacaatgaaccacatttacctcctggcttcagattccaccccacagatgaagaactcatcacatactacctcctcaagaaggttctagatagctccttcactggccgagccatagttgaagtcgacctcaacaagtgcgagccatgggaacttcctgagaaagcaaagatgggtgagaaggaatggtacttctatagccttcgtgaccgaaagtacccaactgggttacgcacaaatagagccactgaagctggttattggaaagccactggaaaagacagagagatttacagctccaaaacttgctcactcgttggcatgaagaaaaccttggttttctatagaggaagggctccaaagggtgaaaagagcaactgggtcatgcacgagtatcgcttagaaggcaaattcgcttaccactatctctctaggagctccaaggaagagtgggtgatctcacgtgtgtttcagaagaacaccaccggcggtggctccaccgtgtcatccgcctccgccgccaccaccggtggtagttctaagaaaacaagaatgaccacatcaaacaatagcagcaacatgagcctctgccccgaaccgggttcaccctcttccatataccttccgccgcttctagaatcttctccttacgccgcggctgcggcaacattcaacgaccgcgaaagatgctccttcgacagcgccgccaacaacaaccaaagggagcacgtgtcctgtttctccaccatctccggcgccgccttcgaccacctcgttccgtcgccggagcctccgctcgacccttccgctcgctttcatcgtaacaacaacaacaacgtcggtgtcggaatctccaccttcccgtgcctcagatccttgcacgacaaccttaaccttcccttctttttctctccaacgggccacatcagcagtgctgaagtggcatcatttggtgccgttggcaactggacggcggcaccggaagagcacaggatggctgacagtggctccggcatgacgattgtaccgtccgagttggattgcatgtgggactattga

SEQ ID NO: 316 - DNA, 1038 bp, Glycine Max
atggatcccaagggctcaaagcagcagccacagcaatcacaggaggtggtaccaaacttcctcagcctcccccaacagcaacaagggaataccaacaacaacaacatgggagagaacaaacctgcagaggtgaaggatttccagatagtggtagctgagaacaaggaagagagcaagaaacagcagcaacagttggcaccaaagaggagttccaacaaggacaggcacaccaaggttgaaggcaggggaaggaggataaggatgcctgctctctgcgcagccagaatcttccagttgaccagggaattgggtcacaaatctgatggggaaaccatccagtggctcctccagcaggctgagccatccatcatagctgccactgggactggcacaataccagcatctgctcttgctgctgctggaaactcactctcaccacaagctgcttctctttcatcatccttgcaccaacatcaacaaaagattgatgaattgggtgggtcaggggggagtagtagtagggccagctggcaaatggttggggggaatttggggagaccccatttgggtgtgggtgtggccacagcagcaggcctatggccccctcatgtcagtggatttggatttcaaacaccaccaacaacaacaacaccaacaacaacaacatcatcatctggtccatctaatgccaccttagccactgagagctccaattaccttcagaaaattgcattccctggctttgacttgcctacttctgccactaacatgatgggtcacatgagtttcacctcaattttgggtggaggtgggggtggtggggcccagcatatgcctggcttggagcttggtctttcccaggatggccatattggggtgttgaatcaacaggccttgaaccagatttatcagcagatgaatcaggctggtagagtgcatcatcatcagcatcagcatcatcatcagcatcatcagcagcaacaacaccatcagcaaactcctgctaaggatgattctcaaggctcaggaggacagtag

SEQ ID NO: 317 - DNA, 1479 bp, Glycine Max
atggatccctacaagaatcggccatcaagcgccttcaattctcccttctggactactaattccggtgctcccatctggaacaacaactcatcgctgactgttggatctagaggtccaattctgctggaagattaccatctggtggagaagcttgcaaactttgacagggaacggatccccgaacgtgttgtccatgctcgtggagctagcgcaaagggtttctttgaagtcacgcatgacatttctcacctcacatgtgccgatttcctccgagcccctggagttcagacccctctcatcgtccgtttctccactgttatccacgaacgtggcagccctgaaaccctcagggatcccagaggtttcgctgtgaaattctacactagagagggtaacttcgaccttgtgggaaacaacttccctgtcttcttcgtccgcgatggcctcaagtttcctgacatggtccatgctctcaaacccaaccccaagtcccacatccaggagaattggaggatcctcgatttcttctcccaccatcccgaaagccttcacatgttctccttcttattcgatgacgttggtatccctcaagattacaggcatatggatggttttggtgttaacacttacacccttatcaacaaggctggcaaagccgtctatgtcaaatttcattggaaaaccacctgtggcgaaaagtgtctcttggacgacgaggccattagggttggaggatcgaaccacagtcatgccacccaagacctttacgattcaattgctgctggaaactatcctgagtggaaactctacatccaaacattggatcccgaaaacgaagacaggcttgactttgacccccttgatgtaactaagacctggcctgaggacgttttgcccctccagcctgttggccgcatggtcttgaataagaacattgataacttctttgccgagaacgaacaacttgcattttgccctgcaattattgtacctggtgtatactactccgacgataaattgcttcagactcgcatattctcctatgctgatacccaaagacacagacttgggccaaattatctgcagcttcctgctaattcccccaagtgtgcccatcacaacaatcaccatgatggtttcatgaatttcatgcacagggatgaagaggtcaattacttcccttcaaggtatgatcctgtccgtcacgcggaaagggtccccgttcctccacgtaccctaggtgggaagcgtgaaaagtgcatgattgagaaggagaacaacttcaagcaacctggggagagataccgatcctggccctctgacaggcaagaaagatttgtccgccgatgggttgatgctttgtctgacccacgtgtcacccatgaaatccgcagcatctggatatcatactggtctcaggctgatcgttctcttggacaaaagatagcatctcacttgaacttgaagccaagtatctaa

SEQ ID NO: 318 - DNA, 3081 bp, Glycine Max
atggatcttgctatgatactagaggctgctctgagtccccagcccgatgaacggaagggcgcggagcagaggttggatgagatgcaacaggccccacagcatcccgttagcctcttccaaatcatcgtcgacagcagcaactgcaatatgcccattcgacaggttgccgccatccatttcaagaacctgatcgccaagaattggaccaaaatctccctcgaccataaagagctccttcggaatcacatcctcctctttctgcctcagctccctcccctcctccggtctcagctcggcgagtgcctcaaaacaatcatccattccgattatccccaccacttccctcatctcctcgattggatcatccttaatttgcaggaccaccatcatgtccactcctccttgtttgtgcttcgtattctttctagaaaatacgagttcaagtccgacgacgagaggactcccatttatcgcgtcgtggaggacacttttcctcttctcctcaatatatttaactccttcctccaaattcccaatccctcaatcgaactcgctgacttgatcaagcttatctctaaaatattctggtcctccatctacttggaggttccaaaggttctgtttgatcaaaatgtattcaatgcttggatggtgctgtttttaaatgtgttggagaggcctgttcccttagaaggccagcctgccgatcccgagcttcgcaaatcgtggggttggtggaaggttaaaaaatggacagttcacattctaaataggctctatactcgttttggtgacttgaagctgcataacctggaaaacaaagcctttgctcaaatgtttcagaaacattatgcagggaagatcttggactgctacttaaatctgttgaatgtcattcgagttggtggctatttgcctgacagagttatcaacctcgttcttcaatatctaagcaacagtatttcaaagaatagcatgtatactgcgctgcaacctcgtcttgatgttcttctttttgaaatagttttccctcttatgtgctttaatgataatgatcaaaagctttgggatgaagatccacatgaatatgtaagaaaaggctatgacattattgaagacttgtatagtcccaaaactgcttccttggactttgtgagtgaattgattcgaaaacgtgggaaagataatcttcacaactttattcaattcacagttgaaattttcaaaaggtatgacgaagcacctgcagaatacaaaccctatagacagaaagatggtgcacttcttgctattggggcactttgtgacaaattgaagcaaactgagccttataaatctgaacttgagcatatgttagtgcaacatgtctttcccgagttcagcagtcctgttggccaccttagggccaaggcagcatgggttgcaggacaatatgcgcacattaacttctcagatcagaacaatttccgaaaggcattgcagtgtgttgtatgtggaatgcgagatcctgaacttcctgttcgcattgattctgtttttgctttgcgttcttttgttgaggcttgcaaagatttgaatgaaattcgacccattctccctcaactccttgatgagtttttcaaacttatgaacgaaattgagaacgaggaccttgtatttaccttggagactatcgtggacaagtttggggaagaaatggcaccttatgcacttgggctgtgccaaaatttggcagctacattttggaggtgcatgaacactactgaagctgatgatgaagccgatgatccaggtgctcttgctgctgttggttgtttgcgtgctattagcactatacttgaatcagtgagcagtcttcctcaactctttgttcaaattgagccagccttgctacccataatgcgtagaatgttaacaactgatggtcaagaggtttttgaagaagttttggagattgtatcatatatgacatttttctctccaacaatatcattggatatgtggagtctttggccactaatgatggaagcactggcagattgggcaattgatttcttctcaaatattctggttcctttggacaattatatttcgaggggaactgcccatttccttatttgcaaagaacctgactatcaacagagtctatggaatatgatttcatccgttatgggagacaaaaatatggaggacaatgatattgagccagctccgaagctaattgaagttgtctttctgaactgcaaagggcaggttgatcaatgggttgagccttatctcagaattacagttgaacgtttgcatcgaactgaaaaatcacatttgaaatgtcttctcatgcaagtgattgcagatgctctttactacaatgcaccactgaccctcagcatattgcaaaagttaggtgttacatcagaaatcttcactctttggtttaatatgttgcaaggagtaaaaaagaatggtgtgcgtgctaattttaagagggaacatgacaagaaagtttgttgccttggtttaacatcattacttgcacttccagctggtcaattgccaggagacgctttaggccaggtgttccgtgccactcttgatcttctggttgcatacaaggatcaagttgcagaagctgcaaaagaggaggaagctgaagatgatgatgatgatgatatggatgactttcaaactgatgatgaagatgaggatgacaatggttctgacaaggaaatgggaattgatgctgaggatggggatgaagctgacagtagtaaatttacaaagttggctgaacagacaaagacattcaggcccaatgatgaggatgatgacgactcagatgatgactttagtgatgatgaagagttgcactccccaattgacgaggtggatccttttgttttcttcgtggatacaatgaaagtgatgcaatcatcggatccattggggtttcagaacctcactcagacacttgagttctcttatcaagctcttgcaaatggtgttgcccagcatgctgagctgagaagaggagagacggaaaaggaaaaattagagaagtcatcagctaccatagattcttaa

SEQ ID NO: 319 - DNA, 6327 bp, Glycine Max
atggatgatccagaatctacaatggcaacggttgctaattttgtggagcaactgcatgccaacttgtcatcacctgttgagaaagaaattattacagcacacttgctaggtatggccaggagaagaaaggatgctagagcactcatcggttctcatgcccaagccatgccattgttcataagcattctcagaaatggaacccctcttgcaaaagttaacgttgcttccactctcagtgtcctgtgcaaagatgaagacctgaggttaaaagtacttcttggtggctgtatcccaccattattgtcacttttaaattatgaatccaccgatgccaggaaggcagcagctgaagcgatatatgaagtttcctcgggtggtctttctgatgatcatgttggtatgaaaatttttgttacagaaggtgtagttccaaccttatggaatcaactaaatccaaagaacaaggaagacaaaattgtggagggttttattactggagcattaagaaatctttgtggggacaaggacggctactggaaagctacattagaagctggaggcgtggatatcatagtagggctcttgtcttcagataatgctgtttctcagtcaaatgcagcttctctattggcacgtttaatgctggcattcagtgatagcatccccaaagtaatagactctggagcagtcaaagctttacttcagcttgttggtcaggaaaatgacatttctgtaagagctagtgctgctgatgccctagaggccctctcttcacagtctaccaaggctaaaaaggtcattgttaatgcagatggtattccaatccttattgcagctatagttgctccttctaatgagtgtatgcaaggtgatggcggccaggctctgcaggagcatgcaactcgagctttagccaatatctgtggtggcatgtctgctttaatactatatcttggagaactttcacgttctcctcgccctgattcaccagttggtgatataattggcgctcttgcttatacactcatggtctttgaggaaaaagttgatgttgatgagaaacattttggtgcaactcagatagaggatattctagtaactcttttaaagccttgggacaacaatttaattcaagagcgtgtcctcgaggctatggctagcctatatggaaatgtctgtctctcaaagtggctcattcaggcagattcaaagaaggttctgattggacttataaccatggctgccactgatgtgcaagagtatctgatactttcattgacaagcttgtgttgtgataagattggattatgggaggccattaaaaaaagggaaggcatccaattactaatatcattgcttggattatccagtgagcagcatcaagagtactcagttcagttgctagcaatcttaactgaccaggtcgatgacagcaagtgggcaatcactgctgctggagggattccaccattggtgcagttgttggagacaggatcacagaaagcaagagaggaagcagcaaatgttctgtggagtttgtgctgtcacagtgaagatattcgtgcttgtgttgaaagtgctggagccatcccagcatttttgtggcttcttaagagtggtggaccaagaggacaggaagcttctgcaatggcactcacaaagcttgtccgagtagctgattctgccacaattaatcagctattagcattgctcctagggcattctccaagctcaaaaacccacataatccgagttttaggtcatgttcttactatggcttcgcagaatgatctccttgaaaagggttctgcagctaataaaggcttgagatctctagttcaagtcctcaattcatcaaatgaggaaacccaagaatatgcagcttcagttctagctgatttatttattacaagacaagacatctgtgatagtcttgcaactgatgagattgtacttccttgcgtgaagcttttgactagcaaaactcaagttgttgccactcaatcagctcgagccttaagtgctctgtctcgtccaacaaagaacaaggctgctaataaaatgtcttatattgtagagggtgacgtcaagccactaatcaagttagctaaaacatcctctgttgatgcggctgaaactgctgttgctgcattggccaatcttctctttgatccttttattgctgctgaggctctagcagaagatgttgtttcagctttaacaagagttctggcagaagggaccttggaaggtaaacgaaatgcatctcgtgcacttcatcaattattgaagcattttccagtaggtgatgttctcaagggtaatgctcaatgctgtttcactgtgcttgcacttgttgattccttaagagctatggatatggacggaactgatgcagcagatgctttagaagtaattgcactgctagccagaactaaacagggtgtcaacttcacttaccctccatggtcagctctggctgaaataccatcaagcttagaacttcttgtctgcttcctggctgaggggcattcccttgtccaagacaaggcaattaaaattctatctagactttgtggggatcagccagttgttctcggtgaattgttatctgctagttccaaatccattggttcattggctaatagaataatgaactcctccagtctagaagtaaaaattggaggttcttccttattaatttgtgctgcaaaggagaagaaagagttttcaatggattcacttgatgcttctgggtatctaaaaccattaatatattctttagttgaaatgataaagcagaattgtagctattcttcattagaaattgaagttgtcacttctaaaggttttatggagagaaattcttttcaagaagttgatgaatttgatattcctgatccagccacttccttgggaagcactattgccatgtggttgctttcagttattgcttctttccatataaagagcaagctcacaattatggaagctggtggacttgaagctctctttgacaaacttgcaagacatacttcaaatccacaggcagaatacgaggatacagaaggaatatggatcaatgccttgctcttggccattttatttcaagatgaaaatgtcattctatctcctgtcacaatgcgcataataccttctatcactcttctgctaagatctgatgaagtaattgataaatattttgctgcccaaactatggctagtcttgtttgtaatggtaataagggaatagatcttgccattgcgaattctggtgctgttgctggattgataactattattgggcatgtagagtcagatatgcctaatctcatggctttatcagaagaattttctttggtacaaaaccctgatcaagttgttttggatcacctttttgaaattgaagatgtaaaagtggggtctaccgccaggaaatctatacccctcttagtggatctcctgagaccaataccagaaaggcctagtgctccaccagttgctgttagactcttgttatccattgcagatggaagtgatagcaataaattaatcctggctgaagctggagctctggaagctttgaacaaatacctgtccttgagtcctcaagactcaactgaggcagctatttctgagttattgagaatattattttgcaattctgaccttattaaacatgaagcatcaactaattcattgaaccaactcatagcagttttgcgtctcggatcaagaaatgctagatatagtgcagcaagagcacttcatgaactttttgatgctggcaacattagagactcagaattagctaaacaggccattcaaccattggttgacatgcttaacacaacatcaggtaatgagcaggaggctgctctcatggccttgatcaagttaacttcaggaaattcttcaaaagtatctcttcttactgatgtggaaggaaacccacttaaatgtttatacaaaatactgtcttctgcttcatccttggaactgaagagccatgctgcgcaactctgctttgctctttttggcaatagcaagatcagagcagatccagttgcctcagaatgcctagaaccctttatatcactgatgcaatctaattctgagactgcaatagtatctggggtttgtgcttttgagagattattggaagatgaacaacaagtagagcttgcagcagcctacaatgttgtggatctccttgtgagcttggtttctggtacaaactatcagcttatagaggccgccatatctactcttatcaaattgggcaaagacaggactccaattaaactagacatggtgaaagctggcattattaataattgtctcaatctactacaattagcacctagctctctatgctccacaatagctgagctgtttcgcattttaactaatagcagtgcaattgcgagaagttcagatgctgcagaaattgtagaaccacttttccatgttttgctccgccgagatttcaacttatggggacagcatagcgccttacaagcacttgtaaatatattggagaaaccgcaaagtcttgcaaccttgaagcttactccaagccaagttattgagcccttgatttcttttctggaatccccatcccaagctattcaacagcttggcacagaactgttatctcatcttcttgcacaggaacattttcagcaagatattacaacaaagaatgcagttgtgcccctcgtacagcttgcaggaattggaatattaaacttacagcaaacagcaataaaagcattggaaaaaatttccacaagttggccaaaggcagttgctgatgcgggaggtatttttgagcttgcaaaggttattattcaagatgagcctcagccaccacatgcgctctgggaatcagctgctttagttctctctaatgtattacattccaatgccgattactattttaaagttcctgtagtggttcttgtgaaacttttgcactcaacacttgagagtacaattagcatagcccttaatgctttaatagttcatgacagaagcgatgcttcaagtgctgagcagatgatggaagctggagttatagatgctctgttggaacttttaagatctcatcattgtgaagaagcatctggtagattactagaagctttatttaacaatgtgagagtacgagagatgaaggtgtctaagtatgctatagcacctttatcccagtatctattggatccgcaaaccagatcacagtctggcaagcttcttgctgctttagctttgggagatctttcccagcatgaaggacatgctagatctagcgcctctgtttccgcatgtcgtgcattgataagtttacttgaagatcagccaactgaagaaatgaaggtggtggctatatgtgcattgcaaaactttgtcatgaacagcaggaccaatagacgagctgttgcagaagctgggggcatattggtgattcaggaattgcttctgtctccaaacacagaagtttctgcacaagctgctttactgatcaaatttttgttttctacccatacactgcaagaatacgtgtcaaatgagttgatcaggtctttgacagctgcactggaaagagagttatggtcaactgccacaatcaatgaggaggttttgagaactctacatgtgatattcatgaacttccctaagctccacacatctgaagcagcaactctttgcattcctcatttggtaggggcacttaaatctggtggtgaagcggctcaggactctgtacttgacacgttttgcttgctaagacaatcttggtcaactatgcctatagatatagctaagtctcaagctatgattgctgcagaagccatccccatattgcaaatgctcatgaaaacctgcccgcctagtttccatgagagggcagatactcttctgcactgcttaccaggttgtttgactgtcaccattaagcgtggaaacaacctcaaacaaactatgggaagcacaaatgcgttctgccggttaacaataggcaatggtcctccaaaacaaaccaaggtagtgaatcatagtacttctccagaatggaaagaaggattcacttgggcatttgatgtacctccgaagggccaaaagctacatatcatatgcaaaagcaagaatacttttggaaagacaacacttggaagagtcactatccaaattgataaagttgtatcagagggggtttatagtggattattcagtcttaatcatgatggtaataaagatggttcttcccgaacacttgaaattgagattatatggtccaacaggatttccaatgatgacatttga

SEQ ID NO: 320 - DNA, 1029 bp, Glycine Max
atggatttgcctcctgggtttaggtttcacccaactgatgaagagctaattagtcattacctttacagaaaggtcacccacaccaacttctcagctagggccattggagaggtggacttgaacaggtctgagccttgggatttgccatggaaagctaaaatgggagagaaagagtggtactttttctgtgtgagagacagaaaatacccaactggtttgaggactaatagagccactcaatcaggatactggaaggccacagggaaagacaaagagattttcagaggaaaatcccttgtgggtatgaagaaaactttggttttctacaaaggaagggctcccaagggagagaaaactgattgggtcatgcatgagtatagacttgatggaaaattctctgttcacaacctccccaaaactgcgaagaatgagtgggtgatttgcagggtttttcagaagagttcaggtgtgaagaggactcatatttctgggatgatgatgttggactcttatggaaacgaattgggttattcttcttctgctttgccacctctcactgattcctcaccttccattgacaacaccaaagtactgagtgttactgatacggcttacgtaccctgcttctccaatccaattgatgctccaagagggatcttcgattccttgaacaacattaacatcaccaccaccaccactaccaacaacaacaacaccctttatggagtttcttcaaaccattcattttacaatactcaacttcatattccaccaactttgccattacctagttcttcaaaccattaccttagagcctttcttgaaaaccaaggaaatggatcaaacatgaggaataatggttatgaaacagagagggaaatggtcagtgtctcacaggaaacaactatttctactgatgtgaacgctgaaatctcttcattgggtaaaaggcaatttgagaatcagcagaatccaactgcttcatcagctgttgttccaatggacgttgctaccttgtggaactactga

SEQ ID NO: 321 - DNA, 1503 bp, Glycine Max
atggcaaactaccaccgcaacaacgtagaaaacgtcgtcctcggccaccaccaccgttccaagtccgcctccgtcgccggccacaccttccgcctatgtaccgccgcctccttccgccgcctcatctttgacgccgtcagctgcggcgccagctctcgctacgccgcgagatccaacacctcctccgacggcgagaaacagcaaaagcaaaaacctaagacgtcgtcgaggaagccgaacaatgcgaagtcggagaagctctcggatctgctgagcattgcggaggctgaagccgacgtggaaacgaagaagaaggaagaaaagctggaagaactgaagctcctcgtgaaggagcttcagcagcacgaagaagtagatgattcaacgaagaaaaaaagagaagctgcggcgaaagtgaggttgttggcgaaagaggatttggaagtaagaggaacgctcgctatgctaggagccattcctcctctcgtcgcaatgctcgatgaaaccgaactaaacgacgtcgattcgctcatcgcgtcgctctacgcgctgcttaacctcggcatcggaaacgacgcgaacaaagcggctattgtgaaaattgggtctgttgagaagatgctcaagtttattgaatctccagatgatctagattcttcggtttctgaagcaattgttgcaaatttccttggattgagtgctttggattcgaacaagcccatgattgggtcttcggcttcaatttcattcttagttagaacccttcagagtttagatgataagagcagttcccaagccaagcaagatgctctccgagcattgtacaatctttcaatcttcccaggcaatgtttcattcattttggaaaccgatttggtagtgtttctggtgaactcaataggggacatggaggttactgaaagatcccttgcaactctcagcaatatagtgtccacccgagagggtagaaaggcgatcagcacggtgccggattctatcccaattttggtggatgtgttgaattggactgattcgccggaatgccaggagaaggcatcatacattttgatggttatggcacacaagtcctatggtgacaagcaggccatgattgaggcaggggttgcatcatccctgcttgagttgtcccttttgggttccacattggctcagaaaagggcctcaagaatattggagattttgagggtggacaaagggaagcaagtttctgggagctatggcttgggtgcagctgtctctgcccctatttgcggctcttcgtcggcgaggccagacggaggaggaggaggaagagagtgttttgaggaggacgaagagatgatgagtgaggagaagaaagcagtgaagcaattagtccagcagagtttgcagaacaacatgaggaaaattgtaaagagggccaacttgcctcacgatatcgcgccatcagatcattttatgtcactcacttcaagttctacttcaaagagcctgccattttga

SEQ ID NO: 322 - DNA, 2334 bp, Glycine Max
atggcaaatcaccctttgacacactctcactctttccgcgagaggtttgatgaaactctcactggtcacaggaatgaaattttggcccttttgtcaaggcttgaagccaagggcaagggaatcctgcaacaccaccaggtggttgcagagtttgaagaaatccctgaggagagcagaaagaaactccaaggtggtgtctttggagaagttttgagatctacacaggaagccatagtgctgccaccatttgtggctctggctgttcgaccaaggcctggtgtttgggagtatctgcgggtgaatgtgcacatgcttgttgttgatgagctgcttcctgctgagtatctgcgtttcaaggaggagcttgttgagggaagttctaatggcaactttgtgcttgagttggactttgaaccgtttaatgcatccttccctcgcccaactctgaacaagtccattggaaatggcgtcgagttcctcaaccgccacctttcggccaagctcttccatgacaaggagagcatgcagccactgcttgaattcctcaggcttcacagttataagggaaagaccatgatgttgaatgacaaagttcaaagcctggattctctccagcatgttttgagaaaagcagaagagtatctgacttcagttgctcctgaaacaccctactcagaattcgaaaacaaattccgggaaattggtttggagagggggtggggtgacatcgccgagcgtgtcctcgagatgatccagcttctcttggaccttcttgaggcacccgacccttgcaccctcgagacattccttggaagagttcctatggtcttcaatgttgttatcctttctccccatggttactttgcccaagataatgtcttggggtaccctgacactggtggacaggttgtttacatcttggatcaagttcgtgccttggagaatgagatgctcaaccgcatcaagaaacaaggccttgatatcacccctcgtattctcattattactcgtcttctccctgatgcagtaggaactacctgtggccaacgtctagagagggtatatgatactgaatattgtgacattctccgagttcctttcagaaccgaaaagggaattgttcgcaaatggatctcaagattcgaagtctggccatacctagagacttacactgaggatgttgcccttgaacttgccaaggagttgcaagccaagccagatctgatcgttggaaactacagtgatggaaacattgttgcctctttgttagcacataaattaggagtaactcagtgtaccattgctcatgctctagaaaagaccaagtaccctgagtctgacatttactggaaaaaatttgaagagaaatatcacttctcatgccaatttactgctgatctttttgcaatgaaccacacagactttatcatcaccagcaccttccaagagattgctggaagcaaggacactgttggacagtatgagagtcacactgccttcacccttccaggactctaccgtgttgttcacggtattgatccctttgatccaaagttcaacatcgtctctcccggtgccgacatgagcatatacttcccatacactgaaactgagcgtaggttaacagagttccaccccgacattgaagagcttctttacagctcagtggagaatgaagaacacatatgtgtattgaaggaccgcaacaagccgatcatcttcaccatggcaagacttgaccgtgtgaagaacatcacgggacttgtggagtggtatggcaagaatgcgcgcctccgcgagttggtaaacctcgtggtggtggccggagacaggaggaaggagtccaaggacttggaagagaaggccgagatgaagaagatgtatggcctcatcgagacctacaagttgaacggccaattcagatggatctcctctcagatgaaccgtgtgaggaacggagagctctaccgtgtcatctgtgacacaaggggtgcctttgtgcagcctgcagtttatgaggcctttgggttgactgtggttgaggccatgacttgtgggttaccaacatttgccacatgcaatggtggtcctgctgagatcattgtgcatggaaaatctggttaccacattgacccttaccatggtgaccgtgctgctgagatccttgttgagttctttgaaaagagcaaggctgacccatctcactgggacaaaatctcccagggtggactcaagcgtattcatgagaagtatgcacattgccctaaacaatcctcacatcctgtcaccataattttactaaaatatgtttccagacatttcggtaaaacttga

SEQ ID NO: 323 - DNA, 732 bp, Glycine Max
atggcaagttatcagaagcactacgatgatcagggtcgcaaggtcgacgagtatggcaatgttgagaggcaaactgacgaatatggcaacccggttcatgccactagtgtcacttatgtagccactaaaagtgttggtggctacaatgatgacactaataagcaacatgataccaccggtgtctatcctgagaaagataccggtaggcatcattttggtcgtggttacgatggtgacactaataagcaacaacatgatgctattggtgtttatcccggaatagacattggtagagatcatgagactaccggtgtttatggcctaaacaccgatagacatcatggaacgactggtgtcaatcccggaatagacacccataaccaacaacatgggactaccggtggttatgctggtgacactggaaggcagcatgggaatacaggtggcctttactatggaaccgacaccgcggacacaggaaccggtcctagaagtggaaacaccggtggcaccggttatggaggcactggtggtactgattatggaacagctggtggcactggttatggaagtggaactggctatggaatcaacactgggggtgcgcacactgaagcagggtatgggaaggagcatcgtcagcatgagcaatctcatggtggtcagcacgagaagaaagggatactggacaagattaaggagaagcttcctggaggacacagtgacaagtag

SEQ ID NO: 324 - DNA, 1548 bp, Glycine Max
atggcaatagaattggcatctcccaattgggttccaaccgcagccgcatgtttggcagccttggccgccctcctcctcttcctcctccgcggtctccgccgccgtaaatacaatctccccccaggccccaagccctggcccatcataggcaacctaaacttaatcggctccctcccacaccagtcgattcacgcgctgagtaaaacatacgggcccatcatgcacgtgtggttcgggtcgaaccccgtcgtggtgggctcatccgtggacatggcgaaggccatcctcaaaacccacgatgccaccctcgccggcaggcccaaattcgcggcgggcaaatacacaacctacaactactcggacatcacttggtcccagtacggcccatactggcgccaggcccgtagaatgtgcctgatggaattattcagtgctaaacgcttagaagaatacgaatacattagaaaacaagagcttcgtggccttcttaacgaactcttcaattccgcaaacaaaacaattttactaaaagaccacctttccaaccttagcctcaacgttataagccgcatggtgttgggaaaaaagtaccttgaggaatccgaaaacgccgtcgtttcgcccgatgatttcaagaagatgcttgatgagttgtttttgcttaatggggtgtataacatcggggactttattccttggatggatttcttggacctgcagggttacataaagaggatgaaggctttgagcaagaagtttgatatgttcatggagcacgtcttggatgaacatattgagaggaagaaaggggttgaggattacgtggcgaaggacatggttgatgttcttttgcaacttgccgaggatcctactcttgaggtcaagcttgagaggcatggagtcaaggcttttacacaggatctaatagcaggtgggactgagagttcagcagtaacagtggaatgggcaatcacagagctattgagaaggccagagattttcaagaaggcaacagaggagctagacagggtaataggtagagaaagatgggttgaagagaaggacattgtaaatttgccttatgtgaatgccattgcaaaggaagcaatgaggctgcaccctgtggcaccaatgttggtgccaagactagccagagaggattgccaagttggagggtatgacatccccaaagggacacaagtgcttgtgaatgtgtggactattgggagagacccttcaatttgggacaaccctacagagttccaaccagagaggtttcttactaaggagattgatgttaaaggacatgactatgagctattgccatttggtgctgggagaaggatgtgccctggctaccctcttggccttaaggtcattcaagcaagtttggccaatttgttgcatggatttaactggagactgcctgataatgtcaagaatgaggatttgaatatggatgagatttttgggctctctacacctaagaaaataccactggaaactgttgttgagcctaggcttccacaccatctttattctctctga

SEQ ID NO: 325 - DNA, 2052 bp, Glycine Max
atggcaatgccatcgggaaatgtggtaatacaagacaaaatgcagtttccaagtggtgctggtggcggtggcggcggcggcggtgctggcggagagatccaccagccccaccactaccgcccgcaatggtttgttgatgagagggatggacttattggttggctgcgaagtgaattcgcagctgccaatgccatcatagactccctttgtcaccatttacgtgttgttggtgatcctggggagtatgatatggtcgttggggccattcagcagaggaggtgtaattggaaccaggtgctgatgatgcagcaatacttttctgtggctgacgtggcatatgcgctgcagcaagtggcgtggaggagacagcagaggcctctggatccaatgaaagtgggtgcaaaggaagttaggaaatccggttctggataccggcatgggcagaggtttgagtctgtaaaggaaggttataattctagtgtagagtcttatagtcatgatgcaaatgtcgcagttactggaggcacggagaaagggactccagttgttgagaagagtgaagaacataaatcaggtggaaaggttgagaaagtgggggataagggtttagcatctgttgaagagaagaaagatgctataacaaatcatcaaagtgaaggcagcttgaagagtgcaaggagtactgaaggatctttgtctaacttagaatccgaagctgttgtaaatgatggatgtatatctaattctaaagggaacgatttacattctgtgcaaaatcaaagtcagagccaaagtctttctaacatagcaaaaacttttattggcaatgaaatgtttgatgggaagacggtgaatgtggttgatggactaaagttgtatgacgatttatttgatagcactgaagttgcaaatcttgtttcactggtcaatgatctaagggtttctggaaaaaaaggacagttacaaggaagtcaggcatatatagtttcaagaaggcccatgaaagggcatggaagggagatgattcagttgggtgttcgaattgctgatgccccagcagaaggggaaaatatgacaggagcctccaaagatatgaatgtagaatctattccttccttgtttcaagatattattgagcgtatggtttcctcgcaagtaatgactgtgaagcctgattgctgcattgtggatttctataatgagggtgatcactcacaaccccacagttggccatcatggtatggaaggcctgtttatgtgctttttctgactgaatgtgaaatgacttttggaagagtaattgcctcagagcatcctggggattataggggcagtatcaagctttctctagttcctgggtcccttctggttatgcagggtaaatccagtgattttgctaagcatgctcttccttccacacgcaaacaacgcatactggttaccttcacaaagtcccaaccaagaaagtcactatcaagtgatgctcaacagcttgcctcggcagtagcatcttctcattggggtccaccgccaagccgatctcccaatcatgttcgtcatcacgtaggccccaagcattacgctacacttccaacaactggggtactgccagctccacccattcgaccacaaatggcagctcccgttggcatgcaaccattgtttgttgctgctccagttgtacctcccatgccattttctgcacctgtgccaatcccagctggttctaccggatggacagctgcacctcctccaaggcatcctcctcctcgagtccctgctcctggaacaggagtcttcctacctccatcgggctcaggtaattcatctcaacagttaccagcaagtactttggctgaagtgaacccaagcacggaaactccaaccatgccggagaaggaaaatgggaaaattaatcataatagtacaagtgcttcaccaaaaggaaaagtgcaaaagcaagaatgcaatgggcatgctgatggaactcaagttgaaccagctctagagacacggctagatagcaatgacaaagctgcaccaagtcattga

SEQ ID NO: 326 - DNA, 1773 bp, Glycine Max
atggcacccagaaaagtcaaagccatgggcattgacttgggcaccacctacagctgcgtggctgtgtggaaccataaccgcgtcgaggtcattcccaacgaccaaggcaaccgcaccaccccttcctacgttgccttcaccgacactcaaaggttgttgggcgacgctgccatcaaccagcgatccatgaatcctcaaaacaccgtcttcgacgccaaacgtttggtcggtcgcagattctccgaccagtccgtacagcaagacataaagttgtggccttttaaggttgtccctggagccagagacaagcccatgattgctgtaacatacaaagacgaagagaaactccttgcagccgaagagatatcttccatggtgctgtttaagatgaaggaggttgccgaagcccatttgggtcatttcgtaaaggatgcagtgatcactgtccctgcttacttcagcaacgcgcagagacaggccactaaggatgccgggaaaatcgcgggtttgaacgtgttgaggatcatcaacgagccaaccgcggctgctattgcttacgggttggacaagaaagggtggagagaaggtgagcagaacgtgcttgtgtttgacctcggtggtggtacttttgatgtttccctggttacaattgatgaagggatgtttaaggttaaagccacggtgggagatacccatttgggaggtgttgactttgacaacaaattggtcaactatctcgtgggtattttcaagaggaggtacaagaaggacattggtgaaaaccccaaagctcttggaaggttgaggtcagcgtgtgagaaagctaagaggattctctcttcaagttcccaaaccactattgagcttgattctttatgtggaggggctgatctacatgcaattgttacaagggcctttgtatggagacggtggagaagtgcctcaaggaggcaaggattgctaaaagcccaagttcatgagcttgttctggtaggagggtctactagaattccaaaggtgcagcaacttttgaaggacatgttcagtgttaatggtaacaaggaactttgtaaaagcataaaccctgatgaggccgtggcgtatggtgcggcggttcaggccgccattttgagtggcgaaggagacaagaaggtggaggagttgttgctgctggatgtgatgccgcttagtcttgggattgagactgatgctggtgaaatgtcagtgttgattcccaagaacaccatgatccccaccaagagggagagcgtcttctccactttttctgataatcaaacaagtgttttgatcaaagtgttcgagggggagcatgcaaagacagaggataacttccttcttgggaagtttgagctttctggtttcactccatcgccaaggggagttccacaaatcaatgtggggtttgatgttggtgttgatggcattgtggaagtcactgctagagataggagcacggggctgaagaagaagatcacgatcagcaacaagcatgggaggttgagtcctgaagagatgaggaggatggtgagagatgcagagaagtataaggcagaggatgaggaggtgagtaacaaggtgagggccaagaacttgcttgagaattatgcctttgaaatgagggacagagtgaagaaccttgagaaggttgtggaggagaccatagagtggcttgacagaaaccaattggctgaaactgatgagtttgagtacaagaagcaggagttggaagaaaagtttcggaagtttaggtaa

SEQ ID NO: 327 - DNA, 1830 bp, Glycine Max
atggcacggatgggcccagggttccgattccaccccaccgacgaagagctggtggtgttctacctgaagcgcaagatgaccggaaacctctcccgctacgaccacatcgccgttgtcgacgtctacaagctcgagccctgggaccttccccctctgtcgaagctgaagacgaaggacttggaatggtacttcttcagcgcgctggaccgcaagtacggaaacgggtcgaggacgaaccgcgccaccgataggggctactggaagaccaccggaaaagaccgccccgtcacccacggcgaccgcaccgtcggaatgaagaagacgctcgtttaccacagcggccgggccccacacgggcgccgcaccaattgggtcatgcacgagtacaagatgctcgacgaggaattggcacgtgccggcacagtgccggatgtgtttgtggtgtgtaggattttcgagaagagtggttctgggccgaagaatggggcaaaatatggtgctcccttagatgagaaggagtgggatgttgaggatgagcaggaggaggaggaggaggagaatgagcagaaggacgtggctcccttgctggttcctcataacgcggtggctcctcctcctcccttgctaattttgatgatgaggttttcaatgctggggcctatgttgaaaccaacgaccttgacatggtgtgtattcattctattgtattgtaattgtatcccaaatgatatatcggtaaatagttggatttatgtatttctcatcgttcatgaatatgtagtcctaccactggagcttaattggaatgatataattgggagtgatacttttccatcactgaactttcatcatggggagtgtagtagccatgctgagtattccaaagtattcatcaaggatcaggagccatcagcaggcacttttggaatttctcggcctgaaaatgactggcctcttgatatgactgagcaacatggcgtggatacaaattcagtgaacaacagagacaatggtgagctgatcaatattggcaatcatctgaattttaatgatgcatcaaatgatatgaatctggatctgttctgggatgccaacgagaatcttccgactgatggatcattcttggaatacaatgatattgcaattgggaatgggagtagatctactgaggctgatcctcctgcgaatgacattctagacgagtatcttacactccctgatgatgatatttacaagtatatatcttttgattctcctcagattcaagagagtgaaaattttattcccaaccaaggatcacctttcactcggcagaatgtggagggagaaactgctgataaagctgtggttagtaatcataattctgaatcacaaaccagaaatgaggcttcttcagtgcagaatacacatgaggcaaagtttgcaccaggaagtacaaatccacttgttaagcaggcctatggttggttagccggcatccctgctgcgcctgcacatgctatggagtttcctgctaaggagattgctcttgggcttcatcctgtagctcagtcttcccatccagctcatataactacaggtatgatcagcataacagacattactttaagaggcaatgcgatggattggacgatgggcaaaaatggagggtttagcactgtaatatccactgggttttgtcaaccggatgttaattcggatgctttgatacctgtttctggcaagactgcatttgtgttgtcgcatggctggattttcctgactggtttctctgttcttattctttcactgagttgcaagatcggaagcatcatgtatactggtaaatga

SEQ ID NO: 328 - DNA, 1617 bp, Glycine Max
atggcactagcacctgttccaaaacttgtcctgggttcagttgccttcgcaatcttctgggtgttagcagttttccctgctgtgccttttcttcccattgggagaactgcaggatccctgctaggtgcaatgcttatggtaattttccgagttattagtccagatcaagcctatgaagcaattgatcttcctattcttggtcttctttttggcacaatggttgtcagtgtttaccttgaaagagctgacatgttcaaatacatagggaaattgctctcttggaaaagtagaggagcaaaggacttgctctgcagaatctgtgtgatatctgctgtctccagtgcactcttcacgaacgatactgcttgcgtcgttctgacagagttcatattgaaaattgcaaagcagcataacctcccaccacatcctttactacttgcacttgctacaagttcaaatattgggtctgcagcaactccaattggcaacccccaaaatcttgttatagctgttgagggtagaatatcatttggacagtttctatttggtattcttccagctatgcttgtaggggttgtagtgaatgcttttattcttttggctatgtattggaaggtgttgtctattcagaaagatgaagaggatccagtggcagaatatgcagcagaggaagaggttaattctcatcagttctctccagccacaatgtctcatttcaactcccttaattctcaagaatggaacacgcgcatagacggttttaacattccaaattcccctcaagttcagactctaagaaaccaatcagctgtgagtcatggcgaaattgacagggttttagattccacaagaaactcaaatgcatcaaaggaggagacaaatggtatgccttctctgacaaaggaggaaacaaatggtagtccttcaaaagctgatgcaattctagataaaccagtagaagcagatctcttgctcacttcagaaacaaaggactatagaagtgtaagatggaaatatgtactgtggaagtcctttgtttacataatcacattaggaatgctgattgcaatgcttctaggtttgaatatgtcatggactgctatttcagctgcactagctttggtagttcttgatttccaagatgctaggccaagcttagagaaggtttcttattcactcttgatattcttttgtggaatgttcatcacagtagatggcttcaacaaaactgggattccaggtgctctttgggatgtcatggagccttattctcaagtagatcgtgccagtggagtagcaatacttgctctagttatactcatcctatcaaatgtggcttcaaatgtaccaactgttctattgcttggaggaccagttgcagcctcagctgctgcaatttcccaagaggatgaaaaaaaagcatggctcatcttggcttgggccagcacagttgcagggaacctttcactattgggatcagctgctaacttgatagtgtgtgaacaagctcgccgagcccccaacattgcatacacattaaccttctggaaccatctgaagtttggtcttccttccacccttataatcactgctattggtttgacactcataagatga

SEQ ID NO: 329 - DNA, 987 bp, Glycine Max
atggcactttctcctattcgttcttcttctttctcttcatcagctattgttgcattggctgtgttactgcttcttacagggacctcttcagctaacctctcaaagaacttctattccaagacatgtcccaacgttttcaacactgtaaaatctgtagttaaatctgctgttgtcagagaacctcgcattggggcatctattgttcgtctcttcttccatgactgctttgttcaaggctgtgatgggtcaatactacttgatgacactccaaccttccagggggagaaaactgcagctgctaacaacaattcagtgagaggctttgaagtaattgatgctatcaagtctgaggtcgagaaaatatgccctggtgtggtctcctgtgctgatatcttggaccttgcttctcgtgactctgttgtccttgttggagggccattttggaaagttagacttggaagaagggattccagaactgccaactttactgctgctaacactggtgttattccacctcccacatctaacctcaccaaccttatcacaaggtttcgagatcaaggactctctgctagggacatggttgctttatctggagctcacacatttggcaaagcaaggtgtactagtttcagagatcgcatatacaatcaaaccaacattgatagaacatttgcattggccaggcagaggaggtgtcctaggactaatggcacaggtgacaacaatctagcaaatctagacttcagaactccaaatcattttgacaacaactacttcaaaaaccttctcatcaaaaggggactcctgaattctgatcaagtgcttttcaatggtggatccactgattcactggtaagaacttacagccagaataacaaggcatttgatactgactttgttaaagcaatgattaggatgggagatatcaaacccttaactgggtcacaaggtgagattaggaagaactgcaggagagtgaattaa

SEQ ID NO: 330 - DNA, 741 bp, Glycine Max
atggcagaacaaaaccaaaaccaaacaactgaagctggaaggcaccaagaggttggtcacaagagccttctccagagtgatgctctttaccagtatattctggagacaagtgtctacccaagagaacctgaatccatgaaagaactgagagagttgacagcaaaacacccatggaacatcatgacaacctctgcagacgaagggcagttcttgaacatgctccttaagctcatcaatgccaagaacaccatggaaattggtgtctacactgggtattcacttcttgccaccgctctcgctcttcctgaagatggaaagatcttggccatggacattaacagggagaattatgaattgggtttgcctgtaattaaaaaagctggtgttgaccacaaaattgaattcagagaaggtcctgctctaccagttcttgatgaaatgattaaagataagaaccatggaagctatgacttcatctttgttgatgcggacaaggacaactacctcaactaccacaagaggttgatagagcttgtaaaagttgggggcgtgatcgggtacgacaacaccctatggaacggatctgtggtggcaccccctgatgctcctcttaggaagtatgttaggtactacagggacttcgtgctggagctcaacaaagccctcgctgtggaccccaggatcgagatttgcatgctcccggttggtgatggaatcactatctgccgtcggatcaagtga

SEQ ID NO: 331 - DNA, 294 bp, Glycine Max
atggcagcacttggtgggaatcgtgatgtgacaggaagccagaacagcgttgagatcgatgctctagctcgctttgctgttgaagaacacaacaaaaaacagaatgcccttttggagtttgaaaaggtggtaactgcgaaacagcaagtggtttctggtaccttgtacaccatcactttggaggcaaaagatggtgggcaaaagaaggtttatgaagccaaagtttgggagaagtcatggttgaacttcaaggaggtgcaagagttcaagcttgttggagatgcacctgcatag

SEQ ID NO: 332 - DNA, 3180 bp, Glycine Max
atggcaggaaacgattggctgaacagctaccttgaagcgatacttgacgtcgggcctggcctggacgatgccaagtcctctctgcttctccgagagagaggcaggttcagccctactcgctacttcgtcgaagaggttattggcttcgatgagaccgatctctatcgctcttgggttcgggcttcctccaccaggagtcctcaggagaggaacaccaggctggagaacatgtgctggcgaatttggaacctcgctcgccaaaagaagcagctggagagtgagacagcgcagagggtgaacaagcgtcgtctggagcgcgagcgagggcgcagggaagccaccgcggatatgtctgaggacttgtcggaaggagagaagggagatccggtgagtgacgtgtcggctcacggcggcgacgccgccaacaaccgagccaggttgcctagaatcagttccgctgatgccatggagacttgggccaacagtcagaaagggaagaagctctacattgtactcatcagcattcatggcctaattcgaggcgagaatatggagctaggacgtgattctgacacgggtggtcaggttaagtatgttgtggaacttgcgagggcattgggatcaatgccaggagtttatcgggttgatttgctaactagacaagtgtcggcaccagatgtagattggagttatggggagccgacagaaatgttgtctccaagagacacagatgattttggagatgacatgggagagagcagtggttcttatatcgttcgtattccctttggtccaagagataaatatattccaaaagaacttctctggccttacattcctgaatttgttgatggagcacttaaccacattatacagatgtccaagtctcttggggaacagattggcagtgggcatgctgtctggcctgttgccatccatggacattatgcagatgcaggtgactctgctactctcctatctggcgcattaaatgttccaatgctttttactggccactcacttggccgagacaagttggaacaacttttaaagcaaggtcgactatcaaaggatgaaatcaacacaacttacaagattatgcgcaggattgaagctgaggaattggcccttgatggttctgaaatagtcatcacaagcactaaacaggaaatagaagaacaatggcgcttgtatgatggttttgatcctgtattggagcgtaaactacgagcaaggatcaggcgtaatgtgagctgctatgggagattcatgcctcgcatggcgacaattcctcctggtatggagttccatcatattgttccacacgatggcgatatagaaggtgaaccagaaggaaatttggatcatcctgccccccaagatccacctatttggtctgagataatgcgcttctttaccaaccctcgcaagcctatgatacttgctcttgctaggccggaccctaaaaagaacatcacaactttggtaaaagcatttggagaatgtcgtcctcttcgagagcttgccaaccttacattaattatgggcaacagagatggaattgatgagatgtcaagcacaaatgcttccgttcttctctcggtacttaagctgattgacaagtatgatctgtatgggcaagtggcctatcctaaacatcacaaacaatatgatgttcctgacatatatcgcctagcagcaaagacaaagggtgttttcattaatccagctttcattgagccatttggtcttaccttaattgaggcagctgctcatggtttgccaattgttgctactaaaaatggaggtcctgttgatattcatagggtacttgacaatggtctgctcatagatccccatgatcagcagtctattgctgatgctcttttgaagcttgttagcaacaagcaactttgggcaaaatgtagacagaatgggttaaagaatattcatttattttcatggcccgagcactgtaagacttacctttctaaaatagccacttgtaaaccaaggcatccacaatggcagcgaagtgaggatggaggtgaaagttcagaatcagattcaccaggtgattccttgagagatttacaggacttgtctctaaatctgaagttttcattagatggagagaagagtgagggtagtggaaatgacaattctttgaattctgatggaaatgctgctgatagaggggcaaaactagagaatgctgttttgtcatggtcaaagggcatctctaaggacatacgcaagggtggggctatcgaaaaaacagatcaaaatccaaacgctggtaaatttcctccattaaggagaagaaaacatctatttgtcattgctgtggattgtgataccacttcaggccttcttgaaactattaaagccatctttgagtctgctggaaaggataaggctgagggcactgtaggtttcatattgtcaacatcattaacaatatcagagatacagtcctttctaatctcaggtggcttgagtcccattgattttgatgcttatatttgcaatagtggcagtgatctatactatccatccctcaatcctggagagcgcccatttgtggttgacttgtattaccactcacacattgaataccgttggggtggagaagggttgaggaagactttagtgcgatgggctgattcaaccactgataagaagggtgataatgacgaacaaattgtgagtcctgctgaacagctttctaccgactattgttatgctttcaaagtgcgaaagccaggaatggctccccctgtgaaggagcttcggaagttattaaggatccaagctctacgttgccatcctatatattgtcaaaatgggacaagactgaatgtaattcctgtgctggcatctcgttcccaagctctcagatacctgtatgttcgatggggttttgaactgtcaaagatggtggtgttcgtcggagaatgtggtgacacagattacgaaggacttcttggtggtctacacagaagtgtcatactgaagggagtgggaagcagtgcaatcagtcaactccataataacagaagctaccctctttcagatgtcatgccattagacagccccaacatcatcgaagcaactgaggggactaggggtgctgatatccaggctttgatcgaaaaagtgggatatctcactggatga

SEQ ID NO: 333 - DNA, 1965 bp, Glycine Max
atggcagttttctcaaaaacccatttctcaattcccatgttgaaagagctttcactggatacttcaccttgtgtcagtcatggaagcagaacaacaaagcaaaggaacacactgatgccaatcaaagcatcagtggcagaggttccccctgctgttaggaaaactgtggatgaaaatgaaggaggaggggatggtgcctctcagaagaagaagctcagggtacttgtggctggtggagggattggtggcttggtgtttgctttggctgcaaagaggaaagggtttgaagtggtggtgtttgagaaggatatgagtgctataagaggggaggggcagtataggggtccaattcagatacaaagcaatgctttggctgctttggaagctatagatttggaggttgctgaagaagttttgagagttggttgtatcacgggtgataggatcaatgggcttgtggatgggatttctggttcttggtacatcaagtttgatacattcactcctgcagcagagcgtgggcttccagtcactagagttattagtcgaatggctttacaagaaattcttgctcatgcagttggggaagatgtcattatgaatgacagtaatgttgttgattttgttgatcatggagacaaggtaacagtggagctggagaatggtcagaaatatgatggagatctattggttggagcagatgggatatggtccaaggtgaggaaaaagttatttggccaaacagaagctacttactctggctatacttgttacactggtattgcagattttgtgcctgcggacattgaatctgttgggtaccgagtattcttaggacataaacaatactttgtatcttcggatgttggtgctggaaagatgcaatggtatggatttcaccaagaacctgctggtggtgctgatatccccaatggaaaaaaggaaagattgcttaagatattcaagggttggtgtgataacgtaattgatttgatacatgccacagaagaagaggcaattcttcgacgagacatatatgacaggacgccaacatttacatggggaaagggccatgtcaccttgcttggtgattctatccatgccatgcagccaaatatgggccaaggaggatgcatggctattgaggacagttatcaacttgcattagagttggacaatgcatggcaacaaagtatcaaatcaggctctccaattgacattgattcttccttaaagagctatgagagagaaagaagattaagagttgccattgttcatggaatggctagaatggcagctatgatggcttccacctacaaggcatatcttggtgttggtcttgggccattagagtttttgaccaagtttcggataccacatcctggaagagttggaggaaggttttttattgacaagatgatgcctttgatgttgaactgggtattaggtggcaatagctccaaacttgaaggcagaccagtatgttgcaggctctcagacaaagcaaacgaccagttacacagatggtttgaagacaatgatgcacttgagcgtgccattaatggagagtggattttattaccatgtggagatgaagcaggtcctacaaaacctatatgtctaactcaagatgagatgaaaccctgcataatcgggagcatgcagcaaaaagatcatccaggcagttcaattataatacctttaccccaggtttctcaaatgcatgcaagaattaactataaggatggcgccttcttcttgactgatttgaggagtctacatggcacctggatcacagacaatgaaggaagacggtacagggtgcctccaaattatcctgctcgcgtccgtccatctgatgtggttgagtttggttctgataaggcttcataccgtgttaaggtgacaagatctgcttcaagtgagtctgaaaaggaaggaacaaaactttatcagaaagtatga

SEQ ID NO: 334 - DNA, 474 bp, Glycine Max
atggcatcggagcttcaattgcccccaggcttcagattccatccaacggaccaggagctggtgttgcactatctctgccgtaaatgcgcatcgcagcctatcgccgttcccatcatcgccgaaatcgacctctacaaatacgacccctgggacctacccggattggcttcctacggagagaaagagtggtacttcttttcaccacgggaccggaaatacccgaacggttccaggccgaaccgggcggcgggaaccggttactggaaggcaaccggggcggataagcccattggccaccccaaaccggttgggataaaaaaagctttggtgttttacgcagggaaagctccgaaaggggacaagagcaattggatcatgcacgagtatcgtctcgccgatgtagatcgctccgttcgcaaaaagaacagcctaagggtacatacatacatgaatgatgatgcatgccctttctag

SEQ ID NO: 335 - DNA, 279 bp, Glycine Max
atggcatctagctcaatgtcatccactggctcatggagtgccaaggacaacaaagcctttgaaagggctctagctgtgtatgacaaggacacgccggaccgttggtacaatgttgctaaggctgttgctgttgggaagactcctgaggaagtcaagaggcactatgaactcctccttagggatgttaggcacattgaatcagggcaagtgccattcccatacaagcaaaatggagggtctcaagaggagaaaaggctgagaaacatgaagctccagtaa

SEQ ID NO: 336 - DNA, 1695 bp, Glycine Max
atggccaaaaagaaagtgtccgaatctctggaccccatggctgccccaaccgatgactcctcctcagctctgcagattcagaacctcaaaaacctcaacgccctccttctcaaggagaccacccaacgccgccaccagattcactctctccagtccgccctccaccgctccgccgtcacattcgacaccaacctcgccttccacctccaaaacgccgtcgtttccgtcttcttcaagaaccagctccaggaaatgaacctccgcttcgacaccctgctcggagatagggacttcgaggtttccgctctcaagcaccagctcagcgacctcgtcgcgcgtctcgagaacgaaacgactgctctcgccgaggatcgtgacgggctcgttcgcgagacgaagcggctggaggcgagcgtcgaccgagagaggaagcttcgggaggaagcggagaaggttaggtcggaaggcgaagagtttttgtctcggaaacagagagacattgcggaactggaaactgagcgagatttggcggttaagagttctcaggagtcgcgtactgcgattggaacgttgaaggaggcgtttgaagcggtgactagggagaagagtgagattcaaagccgaaacagtgctctagagacgaaaatcggttatctggaaactgagttgaagcaactcaacgattatacgcggaaggaagaggagattacgcgtgcgaagattctcgaactggaagggaaccttggcattgccatgcagaaggaagaggagatgaaaatggagataagtgctcttctgaaggagaagaaggaggtggaaatgaatgttgaaatgttaacagaggaaaaagatggtgttcgtgaggctctgagtgtggttcagaaggagttggaggataagcagcgcgagcttgatgaagctgttaaggggaggaatgagattgaggaggtcaaggtcaatctcgagaataaaattgttgagttgcgagggaaagtgaacgagttgaaagagtctggtaaaaagtttgaagaggaaaacaaacagtcgctttcgcaggttaagcgttatgaaaatgctgttgatgaagctgtgcttgagaaggatagcatcaagaaggcatttgacgaggagaagaagaaagtggtgaagttagagctgcttattgcaaaaacgaaggaagtggctgcgaaaagtgatgctgagttgggacaagtgagaagtgaaagaaacaagctagttgagaaggaaaaggaactggaaggcaatgtgagtgttttgagggaagaaaatgaagcattgcagggtatgctcgcgaaggcgcgaaaggagtccaaggatttgaatgccaaggttgaagtttggtgcagcaattcaaacaaagcactgtcattgttgaagactactgctgctgcacttgtgtgtcaacacaaggaaaggggtggtgatgaagtggtggcggcggcggccgatgagaatcctgtggaagaaattcagccgtatgctcaagaactggatgcaataaagaaggctttcaaaactaaggatgagatggtagatgacatgaagcaacaacttgtttcactcaacaagtctgtggctgaggcacacaagagtaagagcttgtggactgtgatatcctctgcaactacaatttttgctgctgtcttagctgcttatgttgctagaggacgctga

SEQ ID NO: 337 - DNA, 4950 bp, Glycine Max
atggccaaaggcgtaatctcagacgaagaagacgacgtcgaactcgacgaggaagagagggaacccgtcgacggtgacgaattggaagagggtcgcgatgtagacaacgaagaagaggacgaagaagaggaagggcaggatgaatatgaaaacgatgggtttatagtggacgacattgaggacgaagaggaggaggatgaagaagaagagagagcagaaagtgatgatgagcgacagaagaagaaaaagaggaagaaaaaggaggagtatgtccttgatgaagatgattatgaattgctggaggacaataatatcaatattcatcgtcggaaggagagcaaaaagttcaagcggctgaaaaaaggcaggagggataccgaggaggagccctctgggctgtctgatgaggaggagtttgttggaagtggtaaagttgggcgaactgctgaggagaagcttaaacgcagtttatttggtgatgatgaaggagctccacttgaagacattgctgaagaggaggagcaaggagaagaggaagaggatgcagacattggagaagatgatgaaatggccgacttcattgtggatgaagaagaagttgatgagaatggggctcctatgaggcagaagaagctgaagagaaagaaaactaggcaggctcctggagtctcttcttcagctctacaagaagctcaagaattatttggtgatccagatgagttgattctgaatcgccagaaaaatctagaaatgagtgaatttagagagactagacttgaagatgaatttgagcctattgttctttctgagaaatatatgacagagaaggatgaccggattagggagcttgatattcccgagagaatgcagatatcagatgagagtactggtgctcctccgttggatgcaagtagtatagatgaagagagtcaatggatttgcaagcaacttaaagatggagcaatctcttggattcccaagaagatttcaaactcccagaataatgaagaggatgacttaccagtcgacaaggatgatattatcagatttttggaactgcatcatgtgcaaaaattagatattccttttattgctatgtatcggaaggaggactgcttaagcctattaaaagacctagagcaccctgaagctggtgatgataattgggataagaatgacaagacacctactctgaaatggcacaaggtactttgggctcttcaggacttggacaagaagtggttgcttcttcagaagcggaagagtgccctccagtcatactataataaacggtttgaagaagagtcccgtcgtgtgtatgatgaaacaagactaaacttgaatcgtcaattgtttgaatcagttatgagatcgctgaaggaagcaggatctgagaaggagattgatgatgttgactccaagttcaacttgcatttcccacctggcgaagctggtgttgatgaaggacaatacaagaggcctaaaaggaagtctatgtatagcactttcagtaaggctggtctttgggaggttgcaagcaggtttggatgtagtcctgagcaacttggattatgtctaactgaagttaacctgcaagagttggaagatccaaaggaaacaccagaagagatggcttccaactttacatgtgctatgtatgatacccctgaagaagtacttaaatgtgccaggcacatggcagctgttgagataagttgtgagcctagcattaggaaatatgtacgtagccactttcttgatcatgcagttgtctcaacttgtcctactgctgatggaaatacaacaatagattctttccatcaatttgctggggtgaagtggctgcgggagaagcctttgtctaagttcgatgatttgcaatggctccttatacagaaagcagaagaggagaaactcattcaagttattattaaactgcctgagcagtatcttaataagttaatagaccaattcaatgaatattatattagtgacagtgttagcagatctgctcaactgtggaatgatcagaggaaattgatactgcatgatgccatttttcgattccttttaccatcaatggaaaaagaggcaagaggtgtcttggcaagtaaagcaaagaattggttacttatggaatacgggaaagccttatggactaaggtttctgtgggaccttatcaacagaaggaaaatgatcttggctcagatgatgaggctgctcctcgggttatggcgtgctgttggggccctggaaagccactaacaacttttgtcatgttagattcatcaggtgaagtgcttgatgtgctttacactgggtcacttacctttaggtcacagaatgttaatgaccaacaacggaagaagaatgaccaggaacgggtgttgaagtttatgaccgatcaccaaccacatgttgttgttttaggagcagttaacttgtcttgcacccgtttgaaggaagatatatatgaggtcatttttaagatggtggaggaaaatcctagagatgttgggcatgaaatggatgggctcagcattgtctatggggatgaatctcttcctcgtctttatgaaaattctagaatttcctctgaacaacttccttctcaacaaggtatagtgaggcgagctgttgctcttggacgttatctccagaacccattggcaatggttgcaacattatgtggacctagaaaggaaatactgtcatggaaactgagccctttggagagttttctcaacccggatgataaatttgcaatggtcgagcaggttatggtagatgtcaccaatcaggttggcttagacattaatttagcaataagtcatgaatggttatttgctccgttacaatttgtttctgggcttggtccacggaaggctgcatccttacagagatcccttgtaagagctggtgcaatttttactcggaaggactttctgactgaacataaacttggtaaaaaggtgtttgtcaatgcggttggtttcttgcgtgtccggcgaagtggtttagctgctagcagcagccaatttattgatttgctggatgatacacgaattcatcctgaatcttatattcttgcacaagagttggccaaagatgtgtatgaagaagatggcacaggtgatgcaaatgatgatgatgatgcactggagatggccatagagcatgtgagagaccgacctagttatttgaaaaaccttgatgttgagcaatatgcttctgggaaaaaacgtcagaataaaatacaaactttctatgacataaaaagagaattgattcaaggttttcaggattggcgtaagcaatatgaagaaccaagtcaagatgaggaattctatatgatttcaggtgagactgaagagacccttgctgaaggcaaaatcgtccaagtcacagttcgcagagtgcaagcccagaaagcaatatgcgggcttgaatctggaatgactggaatcctcttgaaagaagactatacagatgactggagagatataattgaattatctgataggctacatgaaggtgacatgctcacttgtaaaattaagtcaatccaaaagaataggtatcaagtcttccttgtatgtaaggatagtgaaatgagaagtaatcggttacagaataaccgtgatattgacccctattaccatgaagaccgaagctgttttcagagtgatcaagacaaagctaggaaagaaaaggagcttgcaaaaaagcatttcaagccaaggatgattgttcatccacgctttcagaacataactgcagatgaagcaatagagttcttgtctgacaaagatcctggagaaagtattatccgtcctagttcacgaggaccttcatatcttactttaactctcaaaattaatgatggagtatatgcccataaggatatagttgaaggtgggaaggaacacaaggacattacaagcttactccgaattgggaagacactaaaaattggagaggacacttttgaggacttagatgaggttatggaccgctatgttgatcccttggtggctcacttaaaggcaatgttaaactatcgcaaattccgaaagggtacaaaagcagaagttgatgaacttttgaagatggagaaagccgagtatccgatgcgcatagtctatagttttggcatctcccatgaacatcctggcacatttatattaacttacataagaagtacaaatccacaccatgagtacattgggctttacccaaaaggattcaggtttaggaaaaagatgtttgaggacatcgataggcttgtagcatattttcagaggcatattgatgatccccagcatgattcagccccttcgattagatctgtgtctgctatggtaccaatgcgaagccctgcaactggtggctcatctggggcatctgggggtagtggttggggtggtggttcaaacagtgagggtggctggagaggtcactcttatgataggggggatcgatcatctactcctggttccaagacaggacgaggtgaatacagaaacaatgggaatcaggacgaacatcctagtggagtgcctcgtccatatggtggtggacgaggacgtggtcgtggccgaggttcttataataatagaggagacaactccaataatgaaagacaggactctggttatgggggcagatggggttctaataatacaaaggattctgatgatggtttaagcaattttccaggggccaaggttcagaattctcctggaagagaagcttttcctggtggttggggtggtggtggaagcggtggaggtggagctagtaacagtgacaatggtggctgggaacaagcaagtggtggtgctggtccaagtgatggtgaacaaggaagctctggctggggatctgccacaaagaaagcagcatctgggaacggatgggggtctggaaattctggcggtggttggtga

SEQ ID NO: 338 - DNA, 843 bp, Glycine Max
atggccactacaacacaacttcacttaccccctggattcagattccatccaacagatgaagaactcgtcatccactacctttgtcgcaaatgcgcttcgcaacatatcgcggttcccataatcgccgaaattgatctgtacaagtacgacccttgggaccttccaggaatggctttgtacggagagaaagagtggtattttttcacgccgagggaccgcaagtacccgaacggttcgcggccgaaccggtccgcgggaaccgggtactggaaggcaaccggagcggataaaccagttggtaaaccgaaaccggttgggatcaagaaagcgttggttttttacgctggaaaagcgcccaagggagagaaaactaactggatcatgcacgagtatcgtcttgcagacgtggatcgttccgttcgcaaaaagaacagcttaaggctggatgactgggtgctgtgccgaatttacaacaagaaaggtgcaattgaaaagcaacaactaccaccaccgagtggggtccgcaaaattgaatgttccgaaatggaggacgagaagccggagattctgccgccagatccgccgtatacggcggcgacggtggcggattgcctgtacttcgaggcttccgactcggtgccccggctgcacacgacggactcgagctgctccgagcaggtggtgtcggcggagtttgcgagcgaggtgcagagcgagccgaagaggggcagcaacaacaacaacgagtttgcatataattacgtggatgccactctcgggaataatcagatgtcgccgctgcaggatattttcatgtacctctccaagtccttctgcaattaa

SEQ ID NO: 339 - DNA, 3975 bp, Glycine Max
atggccatagctcggttagttcggcaagcaaagcggcctcatgggttgtgggtgaagatgacagctgtgaccatattgggtctctgcttcatcttcgtgtggggggtgttttcgtcttcttcaacctctgtcaccacccaaagggagagctttgaggacattgcagaacctgcttcctcttcctcttctcacaagcctcaaaagttgaagaaagatgaatctaaaaaacacccttctgctgccacgcgtcaccaccctgaacaacataagggaaaagacaacaacaacgacaacaaagagaagaaacacgtgcataaggaggataataataaggagaaagggaatcatcaagggaatgaagatcctcaaccacaacatgaccaggaagaagagaaagagaaagagaaagaggaggtggaggtggagggtgaggccgatgtggatgctggcggcggcgatttggctgaatctgtggatcagggcgactctgatgaggcggtggaagatgtggaggaggtgagaaaagcaagcaagggaaagggaaaggtgaaaggacccttgtttgatccaaatgctacctatagctggaaactgtgtagcactagaagcaagcataattacattccctgcattgatattgaagttggtggtgggaaggtacctagttaccggcacacggagaggagttgcccgaggacacccttcatgtgtctggttcctcttcctcatgaagggtatgagtctccactaccctggcctgaaagcaaattgaagatattgtacaagaatgttgcacacccgaaactagctgcatacgtaaaaaggcataattggttgatggagtctggagagtatcttacttttccccaaaaccaatctgagttcaagggagggattcttcactatcttgagtccattgaagagatggtaccagacattgaatggggtaaaaatattcgtgttgtcctggacattggatgtacagattcaagcttggcagctgctctctttgacaaggagattttaacattatcactaggcttgaagaatgacctagtggacttagctcaggtggcgcttgagcggggcttcccagcagtgattagtcctttaggtagaaggaggcttccttttccaagtcaaagttttgatgctatacattgtgggggttgcagcataccttggcattccaatggtggtaagcttctattagagatgaatcggattctacgacctggtggatactttattatgtcaactaaacatgacagcattgaagaagaagaagccatgaccacattaaccgcatctatttgttggaatgttctggcgcataaaagtgatgatgttggcgaagttggagttaaaatatatcaaaagcctgaaggaaatgacatttacgaattgagaaggaagaaggttccaccaatttgcaaagaaaatgaaaatcctgatgcagcctggtatgttcccataaagacttgtttgcacaccattccaattggaattgaactacatggagcagagtggcctgaggaatggcccaagaggctcgaatcttatcctgactgggtgaacgacaaagagaaagtggttgcagacaccaaccactggaatgctgttgctaataagtcatatctcaatgggttgggcattaactggacaagtatccgaaatgtaatggacatgaaatctgtttatggaggattggctgttgctctctctcaacaaaaggtctgggtgatgaatgttgtacctgttcatgcaccggatacgcttcccatcatttttgaacgaggactaattggtatataccatgattggtgtgaatcatttggcacttatccaagaacatatgaccttttgcatgctgatcatttgttctcacggctcaaaaacaggtgcaagcagcctgtgaccattgttgtcgagatggaccgtatattacggccaggaggttggataattatacgtgacaaagttgaaattctaaatccgttggaggaaatattgaaaagtatgcagtgggagattagaatgacttttgctcaagacaaggaggttcccgcgcgtctcacactcctcgctctcttctccgccaccaccttctactgtctctacaagtctcgccgcttaagacaccttaaactctccctaaaccctaaccctaaccctaaccctaaccctaagattctcttcctctccgaaacaggcaccgccaaaaccctcgcgcgtcgcctccaccggctcctttcctccaacgatgtcgcattcgacctcgtcgatgcgcagcactacgagcccgaggacctccccaaggagacgctcatcctcctcgtcgcctccacgtggcaggacggcgctgcccccgccgcctcccgcttcttcgccacgtggctcgccgacgccgccgccgacttccgcgccggctcccttctcctctcccgctgccgcttcgccgtcttcggcgtcgggagccgggcctacggtgacgactccttcaacgccgtcgcgaagggcctcgccatgcacctgagggcactcggcgcgacggaggccgttcccctgtccgaaggggacatcgacggtggcgatgacgtggacgcggttttcgatcggtggtgtgagaaggtggtggcggttttgaaaggcgttggtgttgtggaaagctgtgataatgatggtgctgaggaatgcggcgtggtttcgagttctgaagaggagtctgatgtggaaagtagtgagattgttgatcttgaggacattgctggtaaagctccttcgcggcggaaggtggtggctaatggggaagagagcaatgggaagttgaatggcagtagagaaatggtcactccggtgattcgagcaaatttagagaagcaggggtataaaattattgggtcgcatagtggtgtcaagctttgtagatggaccaaggcgcagcttcgaggtcgaggtggttgctataagcactcgttttatggaattgagagtcacagatgcatggaggcaacccctagcttggcttgtgcaaataaatgtgttttctgctggaggcatcacacaaatccagttgggaaaagttggcagtggcagatggatgatccaatagagattgtaaattctgcaatagacctgcatacaaatatgattaaacaaatgaaaggagttcctggagttaccttggagcgattatctgaaggtctctcaccacgtcattgtgcattatcgcttgttggtgaacctattatgtatccagagataaatgcacttgtggatgagctgcacaaaaggaggatttccacttttctagttacaaatgcacaatttccagagaaaattaagtcactgaaacctatcacccagttatatgtaagtgtagatgctgcaacaaaggactctttgaaggcaattgatagaccactctttggagatttctgggagcgattcattgattccttgactgctctaaaggaaaaacatcagcgaacagtataccgcctgaccctggtgaaaggctggaataccgaagaagttgatgcttattctaagctctttagtttaggagaacctgactttgttgaaatcaagggagttacatattgtggctcgtccactacgtcaaaattgacaatggataatgtcccttggcatgctgatgtgaaagctttttctgaggccctagctttgaaaagccaaggagagtatgaagttgcatgtgagcatgctcactcgtgctgtgtcctcttagcaaaaactaataagttcaaaattgatggccagtggtatacatggatagactatgaaaaatttcatgatctggtggcatctggaagaacttttgacagcagagattacatggctgccacaccatcgtggtccgtctatggatcagaggaaggtggatttgatccaggacaattgagatacaggaaagagagacatcacaagtctacccgcaatcaagcaggttag

SEQ ID NO: 340 - DNA, 621 bp, Glycine Max
atggcccatagtgggaaacttaccacacatgggcccggtaccgcaccactccctggcggccttggcccgcatccacggcccgctgatgcacctccgcctcggcttcgtcgacgtcgtggtggcggcgttggcctcgcagccggcgcgaaatatatagcttataactaccaagacctagaagagatagcaagattgacacataacttagcaagttcacactcaagaggggtgaatttgggacaattatcaaatgtatgcaccaccaacgcattggctaggatgatgattggactccgagtgttcaacgatggcagtggagggtgtgatcctagggctgatgagtttaaggctatggtggtggaggtgatggtgttggctgagtggctagaccttcaaggggtgcaagctaagatgaagaaattctataagaatttaaaattctctatccaaacatactctaaaaaatttgatgcatttttaaccagcattattgaggagcacaatagttcttccaagaatgagaagcataagaatttgttgagcatcttattgtcgcttaaagatgagagggatgatcatggaaatcatctcaccgatacggagatcaaagggctacttctg

SEQ ID NO: 341 - DNA, 432 bp, Glycine Max
atggcccatggaatacataacctatattccttcaccttcacttcactctcagatcgctctttctgtcacacactcacattccggtgcaaaatgaaggtcatcgccgcctacttgctcgccgtattgggaggcaatgcagccccttccgctgatgacttaaggaccatccttggctccgttggagctgacgcgaatgatgacaacatcagcaacttcttgtctgaagttaagggcaaagacattgcggagcttatcgccgccggtagggaaaagttggcctccgtgccttctggcggtggcgccgcggtttccgtggccgctgctcccggtggtggcgctgctgcaccggctgccgccgaatctaagaaggaggaaaaggtggaagagaaggaggaatcggatgacgatatgggattcagtctctttgattaa

SEQ ID NO: 342 - DNA, 1272 bp, Glycine Max
atggccctcgaaacctggctcatcaaggtcaaaacggcgctgtcgcacagcctcacgaagaaaccgtcgttttcctcgtcgaagccaaaacgcgtcgccgttttgtccttcgagatcgcgaacgtgatgtcgaagctcctccacctctggcagtccctctccgacgccaacgtcgtccgcctccgaaacgatgccatctccctcgaaggcgtgcgcaagctcatctcaaacgacgagtcgtttctcctaagcctcgccgtggccgagttcgcggactcgctccgactcgtcgccgactcggtctcacgactcagccacaactgccacgaccccactctccgatccttcttccgagtcctcaccgagttcgccaactcgggcctcgacccgcacgcgtggaccctcactgcccccaaagacatcgaaactaaacacagaaaattgcaacattacgtgaccctcacggcaacgctccacaaagaaatcgacgcgctcacgctcctcgagagcgcgttcaaaaaagcgcatctcaacgctgacaccaccaccgagcagcacaagaaactcaacgatcttcagcaaaagatcttatggcagaagcaagaggtgaagaacctgaaggaacgttcattatggaacaaaaacttcgatggggttgtgttgttgttggcaaggttcgttttcaccgtcttagcaaggattaaggttgtcttcggaatcggacacagtagtgttccctttttgtcgcgtagtttgtcttccgtttatccctctgatcatcaaaacccgatttccaattcttgctcttctttgaagggtgatggtgatactttgggtgcttcagctttggctttgcactatgcaaacttggtgatggtgttggagaagatgataaagtcaccccagttggttggggtggaagctagggatgatttgtatgggatgttgccaagaagcataaggtcatgcttgaggggaaggttgagaggggtggggttttcagcatgtgatgatcatgtgctggctgcggagtggagggatgcattggggaggatattgaggtggttgggacctttggcgcataacatgatcaagtggcagagtgagaggagctatgagcatcagaacttggtgccaaagaccaatgtgttgttgttgcagactttgttctttgcaaacaaggagaagacagaagctgccatcactgagctgcttgtggggctgaactatgtttggaggtttgagagggaaatgacagctaaggcattgtag

SEQ ID NO: 343 - DNA, 1335 bp, Glycine Max
atggccttgcagaacattggtgctggaaatagtgatgatgccttctatcggtataagatgcctaaaatgattaccaagatcgagggtagaggaaatggcatcaaaacaaatattgtcaacatggttgacattgccaaggcattggcaaggccaccctcttacacaaccaagtactttggttgtgaacttggggcccagtctaagtttgatgagaaagttgggacttctcatgttaatgggtcacatgacaccccaaaacttgctggtcttcttgagatctttatcaagaaatatgtccagtgttatggttgtggaaaccctgaaactgagatattgattactaagaaccaaatgatccagctgaaatgcgctgcttgtggttttgtgtcagatgtggatatgagagacaagctgactagctttattataaaaaaccctcctgaaacaaagaaaggatccaaagacaagaaggccatgaggagagccgagaaggagagactgaaggaaggtgcagcagctgatgaggaacaaaagaaaatgaagaaagagactaagaagaaaagcttatcttccacttccaaggatgagaccacaaagtcaaactctacaaagaagaaagccagtggctctgatgaagattgtcgatctccagatcacagtcaagttgatgatgagaaagaagaggcacctgatgaagatgatgatggtgaagtacaatggctaacagatacgtcattagaggctgctcggcaacgtatccaagagcagctaagtgccgtaacagctgatatggtcatgctctccacagatgagccagagaagaaggaaacagcatcaagtaagaaaagtgatggttctgaaaatggtaacacgatgcactacaagaaactggttggagaagtgaaagcaatcttgaacaaaggtgttgtggcgagtgaattgcagtcccaaatggaagcaattccatcaccagctcaagaaaagatcagtgctctgattgaggccttatttgagggcattgagaaagggtttgcaaaagaggtggtcaagaagaagcgctactttgatgctgcagtttccatgggggagggatcacatttgctattgcttcgtgcaattgaggctttctgtctaaagtccacttccaatgctttgaaggaaattgccattgttttgaaggcactgtatgatgctgatctgttggaggaagagcacatagtgcagtggtatcaagaagggcttaagggtgacaacaagcactctcagatatggaagaataccaaacctttgattgaatggcttcaaagtgcagaatcagaaacagaggaagaataa

SEQ ID NO: 344 - DNA, 3381 bp, Glycine Max
atggcgacggagcagttaatgtcctccgccggcggcggcagctctcgctacgtccaaatgaaatcgtctccgccgccgtcgccgccggccgcggcggccgaggagatttcctcggtcccgtcgttccggcacagcggcgccgaggccaatcggattttcgaggaattgcccaaagccgccatcgtctccgtctctcggcccgacgccagcgacatcagccctatgcaactctcttacacaattcaggttcagtacaaacagttcaagtgggagctaacaaagaaagcccatcaagtatttattttgcatttcgcgctaaagaaacgtgcttttattgaggaaatccacgagaaacaagagcaggttaaagaatggcttcaaaatctaggaattggagaacacactgctatggcgcaagatgacgacgaaggtgatgatgagactgtcccgttgcatactgaagaaactcatgaaagtgccaaggacagagatgttccatctagtgctgctctgccaattatacggccagccttgggaagacagcattctattgcagacagggcaaagagagcaatgcaaggatatctgaatcactttttgggaaatatcagtattgtgaactctcgtgaggtttgcaagttcttggaggtatcgaagttatctttttcacctgaatatggtcctaagctgaaggaagaatacgtgatggtgaagcatctacccaaaatccagaaggatgatgattccaggaagtgttgtttgtctgactgttttagttgctgtaatgacaactggcaaaaggtatgggctgtactgaaacctggattcttggcattgctggcagatcctttcgatacacagcctctagacatcattgtttttgatgtactgcctgcctcagatgggaatggggatggtcgactatcgctggcgagtgaaatgaaggaacgaaatcctttacgtcattcattcaaggtgacttgtggaatccggagcatcagaattagagtgaaaagtagtagtaaagttaaagattgggttgctgcaattaacgatgctggactcaggcctcctgaaggctggtgtcatcctcaccgttatggttcatttgctcctccaagaggcctagttgaagacggaagtcaagcccagtggttcattgatgggcgagcagcatttgaggccattgctttttcaattgaggctgcaaaatcagagatatttatctgtgggtggtggctgtgcccagaactgtatctacggcgacctttccacactcatgcttcgtcaaggcttgataatttgctggaagcaaaagctaagcaaggggttcagatttacattcttctctacaaagaggtggctcttgctttgaaaatcaacagtgtttatagcaagaaaaagcttcttagcattcatgagaatgtgagggtattacgctatcctgaccacttttctactggtgtttacctgtggtcgcatcatgaaaaactagtcattattgataaccatatttgctttattggaggacttgatttgtgctttggtcgttatgacacatctgagcataaagtgggagatttccctcctctaacctggcctggaaaagactattataacccaagagaatctgaaccaaattcatgggaagatacaatgaaagatgaattagaacgtgaaaaatatcctcgtatgccttggcatgatgttcattgtgccctttggggaccaccttgccgtgacattgctaggcactttgttcagcgatggaattatgccaagaggaacaaagctccatatgagcaagcaattccattacttatgcctcagcatcatatggttattccacattacttgggaagaagcagagagatacagattgaaagtaggaacactgacaatcatagagttctcaagagagaagattcattttcctcatcttcccaagaccaagatattcctctacttttgcctcaggagcctgatgggttggatactcatgaaggagaccaaaaattgaatggggtaatctccttttcacatcaccttgacaagccaagaaggatcagcagtggtcttccgttctcgttccggaaggccaaaattgtagcagttggtccagatacaccaatgaagggctttgtagatgatctagattctgagcatggtcttgagaaaatgtctctggatagagtggctcattttgatttacaaagtacaaagccacaatggtgggaaacgcaagaacggggtgaccaaggaggttttgctgaagaatcaggacaagttggtcctcttgcttcctgccgttgccaagttattaggagtgtgagtcaatggtctgctggaacaagtcaaaccgaagagagcatccacaatgcttattgctctcttattgagaaagctgaatacttcatctacattgagaatcaattttttatctcaggtctttctggagatgagatgatacggaatcgtgtgttagaagctttatatcgacggattatgcgagcttacaatgacaaaaaatctttcagggttatagttgtcatacctctcctgcctggcttccagggcggtcttgatgatagtggtgcagcatctgtgagagccataatgcattggcagtatcgaaccatttgccgagggcagaattctatcatgcataatctttatgaacttcttggttctaaaatacatgactacatctctttttatggcctaaggtcttatggtagactctctaatggtggccctgtggcaaccagccaggtgtatgttcacagtaaaatcatgattgttgatgattgtattactttgattggatctgctaatattaatgataggagcttacttggctccagagattctgagattggtatagttttagaagacagagagtttattggttcttatatggatggaaagccttggaaagcaggaaagttttccttgaccctccgattgtcattatggtctgaacacttgggtctccctataggagaggtcaatcaaataatggacccagtcgttgaatctacttacagggatatttggatggcaacagcaaagacaaatactacaatttaccaggatgtcttttcttgcgtacctaatgatctgatacacaccagacttgctttcagacaaagtgtggctttctggaaagaaagaattggtcacacgaccattgatttaggaatagccccagaaaaattagaatcctattatgacggaggcattacaaacaccgatcccttggagagattagcatcagtgaagggtcatctcgtttcctttcccttggaattcatgtgtcaggaaagtctaagacctgcttttaatgaaagcgaatactacgctactcaagttttccattga

SEQ ID NO: 345 - DNA, 2430 bp, Glycine Max
atggcgcaaattctgcttcatgggactctccatgccaccatcttcgaggttgataggctcaatgctggtggtggtggcggcaattttttcagcaagctcaagcaaaactttgaggagactgttggtattggaaagggagttactaaactctatgcaaccattgatctggagaaagcaagagtaggaaggactagaatcatagaaaatgaacatactaatcccagatggtatgagtcttttcacatttactgtgcccatatggcttcaaatattgtattcactgtgaaagatgataatcctattggggcaactttaattggaagagcttatgtgcctgtttcggaggtcttggatggtgaggaaatagacaggtgggttgaaatattggatgaggaaaaaaacccaatacatgagggttcaaagatccatgtgaagctgcaatattttgatgtcacaaaagaccgcaactgggctcgaggcattagaagtcctaaatttcctggagttccctatactttcttctcacagaggcaaggatgtaaggtatctctgtaccaagatgctcatgtgcctgataattttgtacctaaaatacctcttgctggaggcaagaattatgaggctcataggtgttgggaggatatatttgatgcaatcactgatgctaaacacttcatatacattactggttggtctgtttatactgaaatttccttggtaagggattctaggaggcctaagcctgggggagaccaaacacttggtgagcttctcaagaaaaaggcaagtgaaggtgttaaggtattgatgcttgtttgggatgatagaacatcagttggtttgttgaaaaaagatggactgatggctactcacgatgaagaaactgcacagttctttgatggcactgaggtgcattgtgttttatgcccccgcaatcctgatgatggtggtagcattgttcaggatttacaaatttctaccatgtttactcatcaccagaagattgtggtggttgacggtgcgatgccaggtggagggtcagataggcgaagaattgtgagttttgttgggggtattgacctctgtgatggaagatacgacactgccttccactcactgttcagaaccctggacacagcacaccatgatgattttcatcagcctaactttcctggtgctgtaatcacaaaaggtggtcccagggaaccttggcatgacattcactcccggcttgaaggacccatagcttgggatgttttgttcaactttgagcaaagatggagaaagcaaggtgggaaggatgtacttgttccattgagagagcttgaagatgtcattatctccccatccccagtaacatttcttgaagatcatgagacatggaatgttcagttgtttagatctattgatggtggggctgcttttgggttcccagagactcctgaagatgctgccagagctggtcttattagtgggaaggataatatcattgatcgtagtattcaagatgcttatattaatgctattcgacgtgcaaagaacttcatctatattgaaaatcagtatttccttggaagctcttttgcctggagtgctgatgatattaagcctgcagacattggtgctttgcatctaatcccaaaggaactttcactcaagattgttagcaagattgaagctggggaaaggtttgctgtgtatgttgtagtcccaatgtggccagagggtgtcccagaaagtgcatcagttcaggcaatattggactggcagaagagaacaatggagatgatgtacagggacattattcaggcactcagagctaagggaatcgaggaagatcctcgaaactatctgacattcttctgccttggcaaccgggaagtgaagaaaccaggagaatatgagccttctgaacaaccagatcccgattcagattatcagagagcccaagaggcccgacgattcatgatttatgttcataccaagatgatgatagttgatgacgaatacataatcgttggatctgccaacatcaaccaaaggtcaatggatggtgctagggactctgagattgccatgggtgcttatcagccctatcatttggctaccaggcagccggcacgtggccagatccatggtttccgcatgtcattgtggtatgagcaccttggcatgcttcatgactccttcctccagccagaaagtgaagaatgcattaataaggtgaaccaagttgctgacaaatattgggatctgtattctagtgagtcacttgagcatgaccttcctggtcaccttctccgctaccccatcgggattgccagtgaaggagatgtcactgagctgccaggatttgaattcttccccgacaccaaggctcgcattcttggtggcaaagctgactacctcccccctatcctcactacttag

SEQ ID NO: 346 - DNA, 5556 bp, Glycine Max
atggcggaaaccactcaattgactcgccacattgagtcctacgtcgactcttcttctcccactcatcaggctgcaagtctgaacgcaattgcatctctcgtgaacactgatgccttaactctagaagcactgatcagagagttggagatgtatttgaccacaacagataacgttgtacgggcaagaggaattcttcttctagcagaggtgatgactcatattgaatcaaaacctcttaacagtgcaactatacatagtttggttggattcttcaaggacagactggcagattggagagcagtgcgaggtgcacttgtgggttgcttggcactgataaggagaaaaagtgttgtgggtatggtaactgatagtgatgccacaaccattgctcagtcttttttacagtacatgcaagttcaatctttaggacagcattatgacaggaagctgtgctttgaactgcttgattgcctgctagaacgctactttgatgcagttactacactgggggaggaccttatttatggaatttgtgaagccatagatgcagaaaaggatccagattgtttaaagcttgcttttcatattgttgagtctttggcacaattaaatccagattcatctggtctacttgcaagctttgctaaagatgtttttgatattttagaaccttactttcccattcactttacacgtccaagtagtggagatactcatgtgcaaagagacctgtcaacatctctgatgagagaaatgctggtggaaccttttaaagaggaggagatttatagagctgtatggtcttgcgggagtgacaaaagtccagggcctgatggtttcaatttcaggttcctaaagcatttttggaatgatttgaagcctgaattcctaaggtttttctcggaattctatgcaaatgcagttttccctaagggccttaattcatccttcattgcccttatccctaagatcaaggatcctcatcttattagtgatttcagacctatatcccttattggttgtgtttacaaaattgttgctaaagtcctatcaaataggctaagcaaggtcatgaatcatctaatagatgaaaggcaactagcatttgtaaagggcagccaattacttcaaggggttttgattgccaatgaggttgtagaggaggctaagagatctaagaagccttgcctggtttttaaagtggatttcgaaaaagcatacgactcggtgtcttggcaattcctcttctacatgatgagaagaatggggtttcatgagaggtggcttgggtgggtaaagggctgccttacaacagcatccatttctgttttagtaaatggaagcccatcagaagaatttaaaccccaaagaggcttgagacaaggagatcctttggctccttttttgtttgacctggttgctgaaggtttgacaggtttgatgagggaagctgtgtctaaaaattgctacaacagcttcatggtaggcaagaatagagttccagtcaacatccttcaatttgctgatgatactatcttctttggggaaccatccatggacaatgtcacagctattaaagctattcttagaagctttgagttggtatctggtcttagaattaattttgctaagagccaattcggtgtgataggcaaatctgaggattggagaagtcgtgctgctgattacttgcactgtagccctctgcagtttcctttcctgtacctagggatgcctataggtgttaatcctaggaggacggtggtgtgggagcctataatcagaaaatttgaagccaaattgaacaagtggaatcacagaaacatttctatggctggtagaactactttaatcaatgctgtcttgacagctttgcccttattttatatgtcttttttcagaatcccctcagcagtcatcaagagactcactgctatccaaagacggtttctttggggtggcaattcagaagggaaaaagatagcttggatctcttggcagcaagtgtgtgctcctaaagaaaagggagggctgggaattaaagatatcaaggtgtttaatagagctctcctcatcaagtggaaatggttgttgttccagcaaccggatcatctttggagcagaattctctcctcttggtggtctgatttaagatcaattgttcagcacagtagtatgaccgctgtcaacaagcaatttctttggaaattgggtggtggggatcaaattttattttgggaagactcttgggtgggtgatggctctgttcttagagaaaaatacccagatttatatcaggtatcttctcaaaaattccagacagtggcaagcatggggatttttggagaaaatggctgggagtggaatttttcttggagaaggcacctctttgatagtgaattgggggaagcaacagcttttatagaccagacctcagctctaagtcctgtagcagacttgaaggatgattgggtgtggggagctcaaccaacgggaatcttctctacaaattctgcttacaactgtctcagatctgagcagcctctccatcagccaaacattatgccattatggtgggaattcaactcatgggtgaaggaagatagagttttgcacagcaagcctatggacaactttcttcagcattgttctttggctggatcgcggaattctaacagaaggaggaagatttggtggattgcagctaccagatccatttggagccttagaaatgacatggtttttaacaaccagtcctttgacatatctaaattgatggacagaactatttatctcacttggtcttggttgaggggatgggaaaaggactttactgttccttttcaccaatggtcctcttggatgtttctccttgtactttctgtagtacctctgtctgcattctcttctacacctctctttgagccgtttgtcattcctctgcttcttgagaaactttcttcttcactgcattcagcaaagattgattccttaaaatatcttagagtgtgctcttccaagtatggggcagggagaattgcaaaatatgccggggctatttggtcttcattaaaagacaccctatctacttatttgggggagccggatttttcttttactatagcacctgtagatggtattggcttcccagagaatgaatttgtactagaagctctgtccctccttcagcagcttattgtgcaaaatagtagtttgttagttagcttgataattgatgatgaggatgtcaactctattttcagcaccattgcctcttatgagacttatgatgctattcctgtgcaagaaaagaagaaactacatgctattggtcgtattctgaatattactgccaagactaccatttcttcttgtaatgctgtgtttgaaagtcttttctccagactgatggataatttgggattttctgttaggtttccaaacagtgatattcccccctctcagagagtcaagttcggattcctttatgtctgcattgaactacttgcagggtgcagggaattaattgttgggtctgatgaaccagctctgcaatatgtttttgagcatgagacatgttgcactatgcttcatcgtttttcaaccccattatttaatgcctttggttcagtcttggcagtaagtgctgacagatgtcctcttgatccagatacatacattggagtgaagggtttgcagatacttgccatgtttggttcagatgtttttccaatacaaaaatcagtatttgagaatattttgaagaaattcatgtcaattatcgtagaggatttcaacaaaacaatattatgggaagcagcattgaaagcattatatcaagtcggctcatttgttcagaagtttcatgagtctgaaaaagctatgagctacaggaatttagtcgtagaaaaaattgtggaaattctgtctcttgacgatattactctgccattttcacttgaattggaagcattatcaaatataggcatgactggaatgaaaaatatgctaaccattcttcaagggttgggaagagcagtattttccaatctatccaaggtccatagaaatttaaggtcttctgatattgctgttcagcttttggaatgctattcttgccagttgctcccatggatccatgaaaatggaggttcggaggactttgtgatgcaatttgtggtggacatttggagtcaagcaggaaattgcatggatttcagtaccctgttcgaggaaaagggtcttcttgacgcaataatgaaagcaatgaaactttctgtagggagttgtgctgtggagagccaaaaccttataattcaaaaagcttactgtgtactatcatcacatactaactttcagcagcttaaagaagtggaaagattacctctaactcctggaaattacaacatttcccttagagatgaaggattaatttcattatttgcgtcagtagttattgcagttttccctaaaacatacattccaaataaaagagtacttatgcatctatttataataaccctcctcagaggtggtgttgttccagttgcacaggccttgggttccatacttaacaaattagtttcaacatccaacagtgcagagaactctagtgatcttaccttggaagaagctctggatgttatattcaatacaaaaatatcattttctagtactgataatggaagaagtaatgggaatgaaatggttcttactgatatatgcttgggcatcgcaaatgatagaatgcttcaaatcaatgccatttgtgggctctcatggataggaaaaggtttacttttaagtggtcatgaaaagattaaagacatcattatgatttttttggagtgcttaatatcaggcacaaaaagtgcctcgcctttgatcaaagattcacttgaaaatactgaagagcatattcaagatcttttagtgatgaaatgtgctgctgatgcttttcatgttcttatgagtgattcagaagtttgtttgaacagaaaatttcatgccatgatacgacctctatataagcagcgattttcctcttctgtgatgcctatcttgcagcagattattacaaaatctcactcctcattgtccagatcttttttgtatcgagcttttgcacatatcctgtctgatactccaatggttgctatactgagtgaagctaaaaagcttataccagttctactggattgcttgtccatgttgacagaagatatccaagataaagatatgttatatggtctgctgctagtcttatctgggatattgactgagaaaaatggacaagaagctgccattgagaatgcacacattatcatcaattgtctgattaagcttgtggattaccctcataagatgcttgttcgagagacagctattcaatgtcttgttgccttgtccgagttgccccacgcacgtatctatcctatgaggacacaggttctacgagcaatatcaaagtgtcttgacgattcaaagagagctgttcgccatgaagctgtcaaatgtcggcaaacatgtgattctttcaccgaaaggaaaatctga

SEQ ID NO: 347 - DNA, 553 bp, Glycine Max
atggcggactcggacaacgactccggcggcgcgcacaacgccgggaaggggagcgagatgtcgccgcgggagcaggaccggttcctgccgatcgcgaacgtgagccgcatcatgaagaaggcgctgccggcgaacgcgaagatctcgaaggacgcgaaggagacggtgcaggagtgcgtgtcggagttcatcagcttcatcaccggcgaggcctccgacaagtgccagcgggagaagcgcaagacgatcaacggcgacgacctgctctgggcgatgaccactctcggcttcgaggactacgtcgagcctctcaagggctacctccagcgcttccgagaaatggaaggagagaagacagtggcggcgcgtgacaaggacgcgcctcctcctaccaatgctaccaacagtgcctacgagagtcctagttatgctgctgctcctggtggaatcatgatgcatcagggacacgtgtacggttctgccggcttccatcaagtggctggtggtgctataaagggtgggcctgtttatcccgggcctggatccaatgccg

SEQ ID NO: 348 - DNA, 765 bp, Glycine Max
atggcggagcatcacgaacacgaggaagtgaagggtgagtccttgttggagaagatttctgggaagatccacgaccacgattcctcgtcttcgtcggattccgacaacgacaaaaccagcgccactgattccttcaagtctaatgttttcaggcttttcggcagagaaaagcccattcatcatgttcttggcggtggaaaaccggctgatgtttttctatggagaaacaagaagatatccgcatcgacactcggagttgcgaccgctatatgggttctgtttgaattgcttgagtaccacctcctgactttggtttgccacttcctgatccttgctctggcggggttgttcttgtggtccaatgcatccactttcatcaacaagagtccaccaaagatcccacaagtgcacattccagaggaacctgttttaaaatttgcctctgctcttagaattgagatcaatcgggcttttgcggtgttaagggatattgcttctggaagggatctcaagaagttcttatcagtgattgctggattatgggttttctctattctgggttgttgggccaacttcttgaccttgttctacatagcttttgttttgcttcacactgtgcctgtgctttatgagaaatatgaagatcatgtcgactcttttggtgagaaagcaattgccgagattaagaagcaatatgcagtgtttgatgcgaaggtattgagcaagatacccagaggacctctgaaagataaaaagaaagattga

SEQ ID NO: 349 - DNA, 900 bp, Glycine Max
atggcggaggttttaaccaaggcgagtttggtttcatcttcttggcatggggttagtcaacggcatcatcatcgaagggtttcaacggttctttcaaataatacatgtagcttccgttccggcgtgggaaagttctcttctttgaagatgaattctcaggttctcagatcttggtcctcttcttctgagtttcagggtaaaaagcttgtctttcatgtaaatagaggattacccaatagggtcaattcgcggttgagagcttctactgggactcagatgaaccttagactagggaaagttcagaaatggtgggaaaaggggcttcaacccaacatgaaagaggtgacttcagcacaagactttgtggattcactgttaaacgcaggggacaagttggtggtggttgatttcttctctcctggttgtggtggctgcaaagcccttcatcctaagatatgccaatttgcagagatgaatcctgatgttcagttccttcaggtgaactatgaggagcataagtccatgtgttatagccttaatgtccatgttcttcccttcttccgattctatagaggcgctcacggtcgattatgtagctttagctgcaccaatgccacgatcaagaagttcaaagatgcattagccaaacacaccccagacagatgcagcttaggcccaaccatagggttagaggagaaagaactcgaagctcttgctgccaacaaagatctttccttcacctactcaccaaaaccattacaaccttcacatgaaaacgaagagttggcaaccgaaactgcttctgctccggctcttggttcaggatctcttccttcaccttcaatgaccctcaatgctgtggcctctaatgagagaaccttgaccacttctgggagatga

SEQ ID NO: 350 - DNA, 615 bp, Glycine Max
atggcggcagcttcaagaaaatcaagaagtgcagtaattggatccctttcctccacccctaggttctgcaactctcactttcactcttactctccatcatcttcatcttattcctcagctttcgcctcttccacctccagcttcacttctcgctcctccaccttctttcaccgctcttcctctccgacacgtgtcaacctctgcggttcctccgctccctccgtccgcttctccctcgaccgctccgtctctccgaaccggtccatctctgtggcgcctcgaaccggcgtgtcgaggcagagcggtggtccgcaccaccaccagcagaagcggacctgcatgtgctcgcctacgacgcatcctggctcgttccgctgcagcctccacaagaagagccacgcgccggcgccggcgccgtactcgccgcaccgcctcaacgcgcgcagatccgcgatgacgaactcgctcgtgagaattcgcggcgtcgagggagatctcgtgaagcgagctctcgccgcgttgattcgaccttcctcgcaccagcagagaaggcgaggggactttcacccgaggcctagcaggctctccgttatgtccaaggcagaggacctttga

SEQ ID NO: 351 - DNA, 1446 bp, Glycine Max
atggcggcggcgtcgcggaggctccgggacctgcagtccgaggccgggaacaagatctgcgttgactgctcccagaagaacccgcagtgggcctccgtctcctacggcgtcttcatgtgcctcgaatgctccggcaagcaccgtggcctcggcgtccacatctccttcgtccgatcggtcaccatggactcctggtccgacatccagatcaagaaaatggaagccggcggcaacgacaagctcaacgcattcctcgcacagtactccatccccaaagaaaccgacatcgttacgaagtacaacaccaacgccgcttctgtttaccgcgaccggatccaggccatcgccgagggccgcccctggcgcgatccgccggtgttgaaggaaaacctctccgccgccggaaaggggaagccgccgctgacgcaaacgcggaggaataataatgaaggtggatgggatgattggggtaacgaggcgagtccccggagcaagagcaagtcgaccggggattttaggaatttgaacggcggcggcggagcgccggcgaggtcgaggtcgacggaggatatctacacgcggacgcagctggaggcgtcggctgcgaaaaaggaggacttcttcgcgaggaagattgcggagaacgagtcgcggccggaggggctgccgccctctcagggagggaagtatgtcgggtttggatccagtcctcagccgcctcagcggcggaatgaagcgcaaaacgattacttctctgttgtttcgcaggggattggtaagttgtctttggttgctgcctctgcggctaatgttgttcaggctggcacgaaggagttcacttctaaggttaaggaaggtggttacgatcataaggtgaatgaaactgtcaatgttgtcactcaaaagacatcagagattggacaaaggacttggggcataatgaaaggagtcatggccatggcttcccagaagattgaggagtacactaaagatgatccaaactggaagaatgataactggcaacgaaatgagaatgatagaaatggttattatcaggattttaatcaagagaacaaaggctggaattcttctattggaagagaacaatcttcatcagggcaatttaaaactcaaagctctagctcttgggatgattgggaccacaacgatagcaggaaggaagtaccagctaaaggatcaagtcattcatcaggtgggctctttagtacccacaactcaagctcttgggatgattgggaacacagagattctaggaaggaagaaccagctaaaggatcagctccccataataacgaggattgggctggctgggataatgccaaagatgatggattcgataattattatgaaggtgcatctaataagaaaggtgttggtcataatgggaaatcagatggcacttggacagagggaggctttctctaa

SEQ ID NO: 352 - DNA, 981 bp, Glycine Max
atggcggctggaactgtcttctgcgctgctgctactgctgcttctaatttgacaacaaccacttttcttcacaaccaaacacctccttccacctcctctcagcctcctctcgattctcttttcctctctgcctcttcccctttcctcggttcaagatctatagtgagttttggagatgttcaaggagggaaggggtgcaatgattcattcttccgcccctatgatgagaatggggatgaggacatggacgagtacttccaccagcctgagaagaagcgcaggctctccgtggagcaagtgaagtttcttgagaagagctttgatgaggagaacaagctcgagcccgagaggaagatttggctagccaaggaactcggcttgcagcctaggcaggtggcgatttggtttcagaaccgccgcgcgcgctggaagaccaagcagatggaaaaggactatgattccctgcaggctagttacaatgatctcaaggctaactatgacaaccttctcagggaaaaggataaactcaaagctgaggtggcaaggctcactgagaaggtgcttggaagagagaaaaatgagagtcacttggaacaggctgaaaccaacggattgcaggagccgctgcacaagtctttggttgattcagcttctgagggtgaagggtccaaagtgacctttgaggcttgtaaacaggaggacattagctcagccaagagtgacatatttgattcatcagaaagcccacaatacactgatggagttcactctgcacttctagagactggtgattcttcttatgtgttcgaacctgatcgatctgatgtgtctcaggatgaagaagataacttgagcaagacccttctgcctcattacatttttcccaagcttgaagatgttgattactccgacccacctcatggttcatgtaattttggaattccggaggaagatcaagccatttggtcttggccttactga

SEQ ID NO: 353 - DNA, 663 bp, Glycine Max
atggcgtttaagctttatggtctaccaatgtccacaaacactacccgtgccatgatctgtctccatgagaaagaggtggattttgaacttgttccagtcaatgtgttcgctgcggagcataagcagcctccttttctctccaagaatccctttggtttgattccattactggaagatggtgatctcactctttttgagtccagagccattaccgcatatgtggctgaaaaattcaaggaaacaggagccgatctgataaggcataaggacgcaaaagaagcagcactggtaaaggtgtggacagaggtagagtctcattactacgagccagcagtgtcacccattatctacgagtacttcgtggcccctttccaaggcaaagagcccgacaagtcagttattgacaccaacgttgagaagctgaagaaggtgcttgatgtgtacgaggccaagctgagcagcaccaagtaccttgccggggacttttatagccttgctgatctcagcaatgtctctgaaactcactaccttatgcagaccccttgtgcttcaacggtcaatgagcgtccccatgtaaaggcttggtgggaagatatctcttctaggcctgctttcactaaggttgtgggaggaatgacttttggtcagaatcaggaagaatga

SEQ ID NO: 354 - DNA, 156 bp, Glycine Max
atggctacgcagtgcggcagcttcctacggcggttccggctgccggaggacgccaaccctgagaagatcgggtacacgcccgagaacggggtgctcaccgtcaccgtgcctaagccggagatgaagccgtcttgttggagtataaggatgaggtga

SEQ ID NO: 355 - DNA, 1296 bp, Glycine Max
atggctcaacccagttccaacggggatctgaataataaccagcagggtcaggttcagcaacagcagcagcagtgggcggcggcgcagccgcatcagtatcagcagcaatggatggccatgcagtacccggccacagccatggccatgatgcagcagcagatgatgatgtacccgcagcattacatgccgtacgctcacccccattacccgccgccgccgccgcctcctcagtcgtctcaccatcaccaccacaaacaggccgcagccgcggcggcggctgcggcctcctccgacgagatcaggaccgtctggctcggcgacctccaccattggatggacgagaactacctccacaactgctttgctcacaccggcgaggttgtgtcggccaaggtcattcgaaataagcaaactggtcagtctgagggatatggattcgtggagttctattcacgagcgacggctgagaaagtcttgcagaactataatggcacgatgatgcccaatacagatcaggcattccgtctgaattgggccacattcagtgcgggggaaaggcgttcttccgatgctacttctgatctctctatatttgtgggggacttggccattgatgttactgatgctatgctgcaagagacttttgctggccgatattcgtctattaagggagcaaaagttgtcattgattctaataccggccgctcaaaaggctatggttttgttaggtttggtgatgaaaatgagagaacgagggcaatgactgaaatgaatggtgtttattgttctagtaggcccatgcgaataggtgttgcaactcccaagaaaacttatggctaccaacaacaatattcttctcaagctgtgctattggccggtggacacgcagctaatggtgctgtggcccaaggttcccattctgaaggggatttaaacaacaccactatatttgttggagggcttgattctgacaccagtgatgaggatctcagacaaccatttttgcaatttggtgaggttgtctctgtgaaaattccagtgggtaaagggtgtggatttgttcaatttgcagacagaaagaatgctgaggaagcaattcacgcattgaatgggacagtaattgggaagcagacagtgcgactttcttggggtcgcagtccaggaaataagcattggagatctgattccaatggaggctattttggtggtcagagttatggaggccatggatttgctgtgagacagaatcaggatatagccatgcaacctgcaactgcaattcaaggggcttcctaa

SEQ ID NO: 356 - DNA, 582 bp, Glycine Max
atggctccaagagacagccgagccaccgcgctcattgggcccggcccaagcctatcaccggcccacaaagagatccgctacagaggcgtcaggaaacgcccctggggccgctacgccgccgagatccgcgatcccggcaagaaaacccgcgtctggctcggcactttcgacaccgccgaggaagccgcgcgcgcctacgacaccgccgcgcgtgagtttcgtggcgccaaggccaagaccaatttcccgacaccctcggaactcatccttaacaataacaacataaacgctcgtagtcccagccagaccagcaccctcgactcatcctctcccccgccaccgccaccgctagaccttaccctcacccctctctcctccgctgtcttcccggtggcgcgtcctgttctattcttcgacgcattcgcgcgtgcggacaccatggtcgccgtctcgcgccgcgagacctgcggcttcgaacgccccgccgccgatttccgccgcggcgactccgactctgattataaccgccgcatactcctggatcttgacctgaacgtgcctcctctcccggaggttgcctga

SEQ ID NO: 357 - DNA, 1896 bp, Glycine Max
atggctcctgtttcattgcctcctgggtttaggttccaccccaccgacgaggaactcgtttcttattacctcaaaagaaagataaatggtcgtaagattgagttagagatcatccatgaagttgatctttataagtgtgaaccatgggacttgccagggaagtcattgttaccgggtaaagatttggagtggtatttcttcagccctagagataggaagtacccaaatggatcaaggaccaatcgtgcaaccaaatctgggtattggaaggccacagggaaggaccgtaaggtgaactctgagagccgtgcaatagggatgaagaaaaccctagtttactatagaggtagggcaccacatggatgtcgcacaggttgggttatgcatgagtatcgtcttgatgagactcagtgcgaaactaattcaggcttgcaggatgcatatgctctttgccgtgtgtgcaagaagactgcagtgattcccccaaaggttggagatcagcactatgttaatgttcctagccatgtaaatcagattacaagtgatcaatcatcaagcattgacattgagatatactcagaaggaagaggtgaagttttagagagctcaaattatttgatgccgtgggatacatgcccatccccaaacataaatattgggtctgctctcaatatcaatatcaatggtgggacaagggataataacattgggacatggtcacacttcttagcagaagacttacccaatcttccaacatctgcttcttcatttcccaattatggatctatgagttaccctccatcaaaggtggatatagcactagagtgtgcaaggatgcaacataggtttaccatgcctcctttggaggtgcaggacttccctcaagttggcatttccgagctgaagatggcacaagcctcgggttccaatatgtgtggaggaagcagaaataatgaaacagatatcttgcaggaaattctttcagttgctcatgcttcccatgatgattttacttttatggttggcaacaattacaatcgtgtgaatgatatgaacaccatgggatttgttgacaaagcatgggaagaccctaacgcaagatcaatagagatcggggatcttgatgatggattcaagacagagaggatggtggagaacttaagatgggttggaatgtccagcaaaaatatggaaaagggctttatggaggagcaaaagattgtgccgattgagcatatctcaaacttccaaactaacagggaagaaaacgaggtgcaagtaggatctcagcaacacaataacaacaaagaactcaatgacactgacattgacgatttctcaatggggttcatcaatggtgacgaccacaatgagaacttcatagatgagggtaacattaattattcaaattctacaaactttgaggttgttgaggaaacaaaagtcagtcatggaatgtttgtctccactcgccaagtagctgacacattctttcatcaaatagctccttcacaaaccgtgaaagttcaactcaatccattaatggctgaagatcaatctatagagaatgcagtaatggttaaccaagggccccctttctttagaaatgcccttgtgttcctctttgcacttttgttgatgcattgtgtgtttttgaaggaacaagtggaagatttgaaatcggaccccaaatgctttgatggtgctaactccatgaagaaaattatgagacaaccagctgagaacatcatatggaatgaacaagaaaatttttggtctgttggtattaaatgcgggaaaggatttagtgtggtcttgaagaagataggcattttcctcaccatatcattggctctttgtaccatgtgggctaaccatgttatagttgactcttag

SEQ ID NO: 358 - DNA, 2133 bp, Glycine Max
atggctcgtgcccgtttccctctttcaatccttctctctctggtcttcgttgctcttcctctttccctcgccaacactgacccttctgatgttcaagctcttgaggtcatgtacaatgcgttgaatagtccaactcagctaacgggttggaaaatcggtggtggtgatccatgtggagagtcatggaaaggggtaacgtgtgagggatcagccgttgtttccattaaactctcaggtttaggactcgatgggactctggggtacctgctttcggaccttatgtcactcagagagcttgacttaagtgataacaagatccatgatacaattccctaccagttgccaccgaatcttacgagcctgaattttgcaagaaataatttatctggaaatcttccttattccatttctgccatggtttcactcaattatttgaatttaagcaataatgcactctccatgacagttggcgatatttttgctagtcttcaagatcttggtaccctggatctatctttcaataacttttctggggatcttcctccttcatttgttgcattggccaatctttcttctcttttcttgcagaagaaccagttgactgggtctcttggtgttctcgttggtttgcctttggatactttaaatgttgcaaacaataatttcagtggatggataccccatgagcttagttccatccgtaatttcatatatgatggaaattcatttgagaacagtcctgctcctcttccgccagcatttacttcacctcctcccaatggacctcatggtcgtcatcattctggatctggttcacataataaaacacaagtttctgataatgaaaaatctgatggccataagggtttgacagtgggggctgtcgtaggcattgttttaggttcagtgctggtggctgccattgtgctccttgctcttgttttctgtatccgaaagcaaaaggggaaaaagggtgcaagaaattttagtgggagccttcctcgtggagttattaacgtaactcctcagatgcaagagcagagggtaaaaagtgctgctgttgttacagatctcaagcctcgtcctgcagaaaatgtgacagttgagagggtagctgtaaaaagtggatctgtaaagcagatgaagtcccctataacttccacattatacacagttgcttctctccaaagtgcaacaaatagctttagtcaagaatttattattggtgaaggttctcttggccgagtttacaaggctgatttcccaaatgggaaggtaatggctattaagaagatcgacaactcagctctgtcattacaggaggaagacaattttcttgaagctgtttctaatatgtcacgcttgcggcacccaagcattgtgacattggctggatattgtgcagagcatggccaacgacttctagtttatgagtatatagcaaatggaaatctgcatgacatgctccattttgctgaagatagcagcaaggcattgtcttggaatgcccgtgtacgcatagcacttggcacagcccgggctttagagtacctgcatgaagtgtgcttgccttctgttgtacatagaaatttcaaatctgcaaatatattactcgatgaggagctcaatcctcacctgtctgactgcggtttagctgctttgacaccaaacactgagcgacaggtatcaactcagatggtcggttcattcggttatagtgctcctgagtttgcattatcaggagtatacactgtaaaaagtgatgtttacagctttggggtggttatgctggaactattgactggtcggaagccacttgacagtttgcgggttcgatcggagcagtcacttgtgaggtgggctacaccccaactccatgatatagatgccttggccaaaatggttgatcctactttgaacggcatgtatcctgcaaagtcactgtcacgctttgctgatatcattgccctctgtgttcagccggaacccgaatttcgacctccgatgtctgaggtggtgcaagcattggttcggttagtgcaaagagcaagtgtggttaaaagacgacccagtgaagaatctggttttggtcacaagaccccagaccatgaggccatggacatgccattttaa

SEQ ID NO: 359 - DNA, 2112 bp, Glycine Max
atggctctaaatggaagtggggatagagtagcggtggataatggttttgaatccattgatgatgcatatgatgatcatgaacacaaactgagccaaaagggtagcatcaagctcaaggaggaagaggtttctgtggagagggtgttccagcaccttctggtgccatcatggaggaaccaattaacagtgagagcctttgtggtcagctttgcactcagcatactcttcagcttcattgtgatgaagctcaacctcaccactggtattattccttcgctcaatgtctctgctggccttctggggttcttctttgtaaagacatggaccaagttcttggagaaatctaacatgttgaggcaacccttcacaaggcaagagaatactgtcatccaaacctgtgttgtagcatcctctggcatagcctttagcggagggtttggaagttacctctttggaatgagtgaagaaatagccaagcaatcttcagacactggtcattttaaggacccaaaattagggtggataataggttttctctttgttgttagctttcttggcctattctcagttgtacctctacgaaagattatggtcattgacttcaaattgacatatccaagtggtactgcaactgcacatctcatcaacagcttccacactcctcaaggagccaaactagcgaagaagcaagtgaaaatgttaggaaaattcttcagtttcagttttttatggggcttctttcaatggttctacacagctactgaccagtgtggatttcaagccttcccttcattggggcttaaagcatataataacaagttcttttttgattttgctgcaatctatgttggagtgggaatgatatgcccatatatcataaatatatcagtgcttcttggaggaattctttcttggggaataatgtggcctctcataaaaaccaaagagggtgattggtatgataagggcctaggtgaaggcaaccttcatggcatccaaggttatagggtatttatagccattgccttgatactaggagatggtttatacaacttcataaaggtgcttactcataccctttggggattgtatcatcaagtccgggtaaaacaaagggagaatgcccttcctgttgcagatcaagactccccctcaaaccctcacctatcttatgatgaccagcgccgcacccaactcttccttaaagatcaaattcccacatggtttgcaattgcaggttatgttgctattgctgccatctctaccgccactctgccacacatcttcccccaactaaaatggtattacattattgtcatctacctaattgctcccaccttggcattttgcaatgcttatggttgtgggctaacagattggtcccttgcatccacctatggaaagctcgccatcttcacaattggagcatgggccggttcatcacacggtggagttcttgctgggctagcagcatgtggagtgatgatgaacattgtttccacggcctcagacctgatgcaggattttaagaccggctaccttactctggcttcaccacgctccatgtttgtgagccaaataattggcacaacaatgggttgtgtaatttctccttctgtgttttggattttctacaaagcttttcccgatcttgggagaagtacaagtgaatatcctgctccatatgcaattatataccgtaacatggccatattgggggtacaaggttttggcaatctaccaaaaaactgcctcttactttgttacatattcttcgctgctgccgtcgcaataaacttgattaaagatttcattggaaacaaagggaggttcataccacttccaatggccatggcaatacctttctacatagggccatactttgccattgacatgtgtgttggaagtctgatattgtatgtgtgggagaggattaacaaggctaaggcagatgctttcgcaccagctgtagcttctggtttgatatgcggggatggaatatggactcttcctgcttcaattcttgctcttgctggtgttaagccaccaatttgtatgaagttcttgtcaagagcagcaaatgcgagggtcgatactttcttagggaattaa

SEQ ID NO: 360 - DNA, 1842 bp, Glycine Max
atggctctctatgatctcatgtttagtcagcttgatgttacttcatcccaacttcttgtgaatgatgggttttttagggatacagctttcagaaaacaactttcagacaccgtgagctcgttactagatttaagggttattcccattttcaatgaaaatgatgctgttagtactaggaaggcaccctatgaggattcttctggtatattctgggacaatgacagtttggctggtctattggctctggaacttaaagctgacctccttgttctattgagtgatgttgagggtctttatagtggtcctccatctgatcccaagtcaaagttaattcatacatatgtaaaagaaaagcatcaaagcgaaattacttttggagaaaaatcaagattgggaagagggggtatgactgctaaagttaatgctgctgtttgtgctgcttatgctggcacacctgtgattattactagtggctatgctacagacaacatcatccgagtgcttcgaggagaaagaatcggtactgtctttcacaaagatgctcatttgtggaccagcataaaggaagtgagtgctcatgaaatggcagtggcagcacgtaatagttctagacgactccaggcaagtaaagtcctaaattctgaagaaaggaggaaaatattgctggcaatggctgatgcattagagataaatgaaagtgtgataaggcttgagaacggagctgatgttgctgatgcagaggagatgggatatgagaaagcactcatatcacgtttaaccctgagacctgagaagatctctagtcttgtaaagtctgttcgcatgctagctgacatggaagaacccattggtcagattttaaagaggactgagctagcagataaactcatcctggagaaaatatcatgtcctttgggtgtcctcctggttatattcgagtctcgaccagatgcccttgttcagatagctgcattggcaattcgaagtggaaatggtctactgcttaaaggagggaaggaagccaaacgatcaaatgcaatcttacacaaggtcattacttcaattattccagatacagtgggtgacaaactcattgggcttgtgacttcaagagaagatattccagatctgctcaaggcaaatcttgtggtccccagaggcagtaataagcttgtctctcaaatcaagggtacaacaaagattcctgttcttggtcatgctgatggaatatgtcatgtatatgtagacaaaacagctaatattgatatggcaaagaagattattagggatgcaaagattgattaccctgcagcctgcaatgcaatggaaacacttcttgtacacgtagatctgtcaaggaatggtggacttgatgaacttgttgctgaactccaacgtgaaggcgttcaattatatggtggaccaagagccagtaacttattaaatatttctgaaacacactctttccatctggagtatagctcactggcttgtacagttgaaattgtagatgatgtatttgctgccattgaccacatacatcaccatggaagtgctcatactgaatgcattgttgcagaagactctgaagtcgccgaagctttcttaagtcaggttgacagtgctgctgtattccacaatgcaagtacaaggttctgtgatggaactcgctttggccttggtgcagaggttggaataagcacaggccgaattcatgccagaggtcccgttggagttgaagggttgttgacaaatagatggatattgagagggagtgggcatgtggtaaatagtgatcgaggggtcacttatacttacaaggatctaccagtaaaagcataa

SEQ ID NO: 361 - DNA, 1950 bp, Glycine Max
atggctggaaaaggcgagggtcctgctatcggaatcgatttgggaacgacgtactcttgcgtcggcgtgtggcaacacgatcgtgttgaaatcatagccaacgatcagggtaacagaactaccccatcctacgtggctttcaccgacacagaacggttgatcggcgatgcggcgaagaaccaggtcgctatgaacccaaccaacaccgtttttgatgctaagcgtttgattggaaggcgtttttccgatgcatcagtacaaggtgacatgaaattgtggccgttcaaggtgattcctggccctgctgagaaacctatgattgtggtgaactacaagggggaggagaaacagttttccgcggaagagatatcctccatggttcttatgaagatgaaggagattgcggaggcgtatctaggttccaccataaagaatgcggttgtcactgtgcctgcttacttcaacgactcacaacgtcaagccaccaaggacgctggtgtcatttctgggctcaacgtgatgcgaattatcaacgagcctaccgcggctgccattgcttatgggctcgacaaaaaggccactagctctggggagaagaatgttctcatttttgatctcggtggtgggacttttgatgtctctcttctcaccatcgaggagggtattttcgaggtgaaggccactgctggtgatactcacttgggaggtgaagattttgataacagaatggtgaaccattttgttcaggaattcaagaggaagaacaagaaggatattagtggaaatgccagagctctgaggaggttgagaacagcatgtgagcgggcaaagaggactctctcttccactgctcaaaccaccatagagattgattccttgtacgagggtattgacttctacacaaccattacccgtgcccgttttgaagagctaaacatggatttattcaggaagtgcatggagcccgtggagaagtgtttgcgggatgccaagatggataagagtaccgtccatgatgttgttcttgttggtggttctactaggattcccaaggttcaacagttgttgcaggacttcttcaacggaaaggaactttgcaagagtattaacccagatgaagctgttgcttatggtgctgcagtgcaggctgcgattctcagtggcgagggtaatgagaaagtgcaggatcttcttttgttggatgttactcctctatccactggtttggagactgcaggaggagtcatgactgtgttgattcccagaaacacaaccattcccaccaagaaggagcaggtgttctcaacctactctgacaaccagcccggtgtgttgattcaggtctatgaaggtgaacgaacgaggactcgtgacaacaatttgcttggcaaatttgagttatctggaattcctcctgctcccagaggtgttcctcagatcactgtttgcttcgacattgatgccaacggtatattgaacgtgtctgcggaggacaaaaccactggacagaagaacaagattacaattaccaacgacaagggcaggctttctaaggaggagattgagaagatggtgcaggaagctgagaaatacaagtctgaggacgaggagcataagaagaaagtggaggccaaaaatgcattggaaaattatgcctataacatgaggaacacaatcaaggatgacaagattgcttccaaactgtcttctgatgataagaagaaaattgaagatgcgattgagcaggctatccaatggctagatggaaaccaacttgctgaggctgacgaatttgaggataagatgaaggagttggagagcatttgtaatcccatcatagcaaagatgtaccagggtgctggtggtgatgcgggtggagccatggatgaggatggtcctgcagctggcagtggaagcggtgctggacccaaaattgaggaagtcgattaa

SEQ ID NO: 362 - DNA, 2868 bp, Glycine Max
atggctggggacaagggaaccatcactcttgaagagatcaagaacgagacagttgatctggaacgtattccaattgatgaagtgttcgagcaactgaaatgtaccagggaaggtttgtcctccacggaaggagaaaaccggcttcaaatatttggacccaacaaattagaagagaagaaggaaagcaagtttctcaagtttctcgggttcatgtggaatccactttcatgggtcatggaggctgcggctattatggccattgctcttgcaaacggcgaagggaagcctccggattggcaagatttcgttggtattgtttgcttgttgctgatcaactccactatcagtttcattgaagaaaacaatgctggaaatgctgctgctgctcttatggctggtcttgctcctaagacaaaggttcttagagatggtaaatggagtgagcaagaagctgcaattctagtccctggagacatcataagcatcaagctaggtgacattatccctgccgatgctcgtcttcttgaaggtgatccactgatggttgatcaagcagctctgactggagaatcccttcctgtgaccaagcatccagggcaagaagttttctctggctcaacttgcaaacaaggagaaatcgaagccgttgtgattgcaactggtgtgcacacattctttggaaaggcagcacatctggtggatagcacgaaccaagttggacatttccagaaggttcttacagcaattggaaacttctgtatttgctccatcgcgatcggtatgttagctgagattatagtgatgtacccgattcagcaccgcaagtacagggaaggaattgacaacctgttggtgctcttgattggaggaattcccattgctatgcctactgtgttgtctgtgacaatggccattggttctcacaagctttcccaacaaggtgccatcactaagagaatgactgctattgaagaaatggcaggcatggatgtcctttgcagtgacaagacaggaacactcaccctcaacaaactcactgttgacaagaacttggttgaggtctttgcaaagggtgtggacaaggatcatgtgatccttcttgctgccagggctgccaggactgaaaaccaggatgccattgatgctgccattgtgggaatgcttgctgatcctaaagaggcaagggctgggataagagaggtgcactttctaccattcaatcctgttgacaagaggactgctttgacttacattgatgctaatggaaattggcacagggcaagcaaaggtgctcctgagcagatcatgtccctgtgtaacctcagggatgatgctaagaagaaggttcatgctattattgacaagtttgctgaaagagggcttcgttcacttgctgttgctagacaggaagttcctgagaaaacaaaagaaagtgctggtgctccatggcagtttgttggtctgttgtcactgtttgatccccctaggcatgatagtgctgaaaccattcgccgagctcttaaccttggtgtaaatgttaagatgattacaggtgatcaacttgccatagctaaggaaacaggaaggagacttggaatgggaacaaatatgtatccatctgcttcattgcttggtcaagacaaagatgcaagtattgccgcacttcccgtagaagagctgattgagaaggcagatggatttgctggagtttttccagagcacaaatatgaaattgtaaagaagttgcaagagaggaagcacatttgtggaatgactggagatggtgtcaatgatgctcctgcgttgaagaaggctgatattggaattgctgttgctgatgctactgatgcggcaagaagtgcttctgacattgtcttgacagaacctggattgagcgttattattagtgcagtcttaactagcagagctattttccaaagaatgaagaactacaccatctatgcagtatctatcacaatccgtatagtgtttggcttcatgtttattgcactgatctggaaatttgacttctcacccttcatggttttgattattgccattctgaatgatggaacaatcatgacaatttcaaaggacagggttaagccatctcccttgcctgatagctggaaactgaatgaaatctttgctactggggttgtgcttggaggttacttggcactgatgactgttatattcttctgggcaatcaaagagacgacattcttccccgacaaatttggagttagaccaattcatgacaatccagatgaaatgactgctgctttgtatctacaagtcagtatagttagccaggctttgatatttgtcacccgttcgcgcagctggtccttcatcgaacgccctggattgctgttagtgactgctttcgttattgctcagctgattgctacagtaatagcagtgtatgccaactggggctttgcaaggatccaaggaattggttggggttgggcaggagtgatttggctctacagtattgtcttctatttcccacttgacatcatgaagttcgccatccgctacattttgagtggcaaagcatggaacaatctcctagaaaacaagactgccttcaccaccaagaaagactatggtaaagaggagagggaagctcaatgggctcttgctcagaggaccctgcatggacttcaaccaccagaaacttctaatatcttcaatgaaaagagcagttatagagaactcactgagattgctgagcaggccaagaggagagctgaagttgcaaggcttcgtgagcttcacacacttaagggacatgttgagtctgtggtgaagctgaagggtctggacattgacacaatccagcagcattacaccgtgtaa

SEQ ID NO: 363 - DNA, 1308 bp, Glycine Max
atggctggtgagcaaggtgatagatgttcctccatcaccataccccttttggatgatgaaaaagtgcaccaagtgaatggttcagaagaggctttggtggccaaaacttgtgatctacacacagctcatgtgggtaacacctcctttttcaagacctgcttccatctaattaatgccctctcaggagttggtattatttccatgccttatgcactggcatctgggggatggttaagcatatcactactatttgtgattgccattgcttgctgttatactggtatgttggtcaaaagatgcatggatatggaccctgacatcaagaattttcctgacataggtcaacgtgcatttggagacaaggggaggataatagtatcaattgccatgaattctgagctcttcctagttgtaacaggttttctgattttagagggtgataatctcaacaaactagtaccaaacatgcaacttgaacttgcagggttaacaattggtggtacaacaatttttaccatgattgctgcccttgttattttgcctagtgttttgttagaggatttgagcatgctgtcttatgtctctgctagtggggctttggcttcttcaatcttcctcctctctatattttggaatggaaccattgatggcactggatttcatgcaaagggaacaattttcagattgagtggaataccttctgctgtcagcttatatgccttctgctatagtgctcatcctatccttcccactctctacaattctatgagagacaaaagtcagttctctagggttctgtctatatgcttttcagtatgcacccttggttatgcagcagcaggtgttttgggctacttaatgtttggacaagaggttgaatcacaagtgactttgaacctcccaacaggcaagttcagttcacatgtagcaatattcactaccttggtcaatcctataaccaaatatgcattgatgcttaccccagtcatttatgctgtaaaaaacaaggtttcatggcattacaacaaaaggtctacacatatgtttgttagtacttccatgctcattagcactcttattgtagccgtggccattcccttgtttggatatctcatgtcactcattggggcattgctaagtgtctcagcttcaattttagtgccatcagtgtgctacttgaagatctcaggagcttacaagagatttgggtctgaaatgatcatcaactattcaataataataatgggggtcactattgctgtagtgggtacttatacatctcttgtagatatagttcataatttgtaa

SEQ ID NO: 364 - DNA, 1695 bp, Glycine Max
atggcttctaccttgtcatgcaactctttcaatcactcaatggcagttttctcaaaatctcatttctcaattcttatgtacaaagagctttcactggatatttcaccttgtgtgagttatggaagcagaacaacaaagcaaaggaagacactgatgcagatcaaagcaacagtggcagaggaacctcctggtgtttggaaaactgtggttgtgtctgaaaatggaggaggaggggatggtgcccctcagaagaagaagaagcttaaggtacttgtggctggtggaggcattggtgggttggtgtttgctttggctgcaaagaggaaagggtttgaggtggggcagtataggggtccaattcagatacaaagcaatgcttcggctgatttggaagctatagatttggaggttgctgaagaagttatgagagctggttgtatcacggatgataggatcaatggcctcgtggatgggatttctggctcttggtacatcaagtttgatacgttcactcctgcagctgaacgtgggcttccagtcactagagttattagtcgaatgactttacaagatatccttgctcgtgcagttggggaagatgccataatgaatgacagtaatgttgttgattttgttgaccatgggggcaaggtaacagtggagctggagaatgttcagaaatacgatggagatctcttggttggagcagatgggatatggtccaaggtgaggaaaaagttatttggccaaatagaagctacttactctggctatacttgttatactggtattgcagattttgtgcctgctgacattgaatcagttgggtaccaagtattcttaggacataaacaatactttgtatcttcggatgttggtgctggaaagatgcaatggtatggatttcaccaagaacctgctggtggtgctgatatccccaatgggaaaaaggaaagatttcttaagatattcgagggttggtgtgataacaggcaattcttcgacgagacatatatgacaggacgccaacatttacatggggaaagggccgtgtcaccttgcttggtgattctatccatgccatgcagccaaatatgggccaatgaggatgcatggctattgagacctaataaagttgtccaagacagttatcaacttgcattggagttggacaatgcatggcaacgaagtatcaaatcaggttctccaattgacattgattcttccttaaagagctatgagagagaaagaagattaagagttgccattgttcatggaatggctagaatggctgctatgatggcttccacctacaaggcatatcttggtgttggtcttgggccattagaatttttgaccaagttttggataccgcatcctggaagagttggaggaaggttttttactgacaagatgatacctttgatgttgaactggatattaggtggtgtaacagccgttgatattacttatcttgtaagttatgagttatatagtaacccgatcagtgtttacctagagaaaatattttttatgcacaggattataggaaaagtgtggggattcctagttaggatcctgaaagatacttggtttgagtgcttctttaagcctatgttggtctcatgtgattggagcattctcgcaaaacaattattatgtactcataagcgccctagcgtgatttttaactga

SEQ ID NO: 365 - DNA, 1071 bp, Glycine Max
atggcttctatttcttgtatgagtgctattttaagctttcttctcatctctatctttctttctgtttacaatattgaagtgtgtgaggcacaagccaggcctcctacagcgaaggggctatcatacaccttctacgacaaaagctgtcctaagcttaaatctatcgttagatcagagctcaaaaaggtcttcaataaggacattgctcaagctgctggcttgcttcgccttcacttccatgactgctttgttcagggttgtgatggatcagtattattggatggatcagcaagtgggccgggtgagaaagaagcgccaccaaacttgactttgagacctgaggcatttaagatcatcgaaaaccttcgtggtcttttagaaaagagttgtggaagagtcgtctcctgctccgacatcactgctctcactgcacgtgatgctgttttcctttcaggaggaccagactatgagattcctttgggaagaagagatgggctaacctttgccacaagacaagtgacattggacaaccttccaccaccctcaagcaacgcttcaaccatcctaagctccctcgccaccaaaaacctcgaccccaccgacgtcgtagcgctctcaggcggccacaccataggcatcagccactgcagctccttcaccaacaggctctaccccacacaagaccccgtcatggacaagaccttcggcaacaacctcagacgcacgtgccccgccgccaacaccgacaacaccactgtgcttgacatccgatcccccaacaccttcgacaacaagtactacgttgacctcctgaaccgccagggcctcttcacctccgaccaagacttgtacactgataaaaggactaagggcattgtctccgactttgccgtcaaccagaacctcttctttgagaagtttgtgttcgctatgctcaagatgggtcagcttaatgtgctcaccgggaaacaaggggagattcgtgccaattgctccgttagaaatgccaataacaagtccctcttgacttctgtggtggaagatgtggtggaaactttgatagaaatgtaa

SEQ ID NO: 366 - DNA, 1560 bp, Glycine Max
atggcttctgcttgtgtgaccttgaaatccaatacccatttagcaaactctgagaagggctttctaggagaaagaataaaaggtggcttcaacaacagtgccttggtaatgaatcagttggctatacgttctagaagccacaagagggtgaaacatggtgttggtgttgtatctgctgttctcacttcaaacaatgccaaagaatcactgaccttgcaagtgccttcctttttaagaagaagggctgatccaaaaaatgttatttccatcatattgggaggaggacctgggacacaactctttcctctcaccaaacgtgctgccacacctgcggttcctgtgggtggatgctacaggcttatagacatccctatgagcaactgcctcaacagtggcatcaacaaaatatttgtgctgacacagttcaactctgcatccctcaaccgtcacattgcccgcacctattttggaaatggcatcaactttggggatgggattgtggaggttctggcggctactcaaacaccaggagaggctggaaagaattggttccaaggaactgcagatgctgtgaggcaattcacttgggtatttgaggatgccaagaatacaaatgttgagaatgtattgatcttggctggagatcatctatatcgtatggattacatggaccttgtgcagagtcacgttgatagaaatgctgatattacagtttcatgtgctgctgtgggtgacagccgtgcatcagattatggattggttaaagtagatgacagaggccgcatcattcaattttctgaaaaaccaaatggtgatgatctgaaagcaatgcaagcagatacctctcttcttgggttgtctccccaagatgcattgaagtcaccatatattgcatctatgggggtttatgtattcaagacagatgttttactcaatcttctgaaatggagatatcctacctccaatgacttcggatctgaaatcatccctgcagctgtgagggatcacgatgtccaatcgtatttttttgaagactattgggaagacattggaacgataaaatcgttttacgatgctaacttggcccttactgaagagagtcacaagtttgaattttatgaccccaagattcccatttacacatctccaggattcttaccaccaacaaagattgacaaatgccagattgtggatgctattatttcccatggatgtttcctgcgagaatgcacagtccaacactccattgtgggtgaacgttcacgtttggattatggtgttgagctcctggacactgtaatgatgggagcagactattaccaaactgaatctgaaattgcttctctgctggcagaggggaaggtcccaattggtattggaaggaataccaaaattagaaactgtattattgacaagaatgctaagatcgggaaagatgtcatcatcgcaaacaaagatggcgttcaagaagcagatagaccagaagatggattctacattcgatcaggaatcaccatcataatggagaaggcaaccatagaagatggcactatcgtataa

SEQ ID NO: 367 - DNA, 2025 bp, Glycine Max
atggcttcttcttccatttccgcaccaacgctcaccttcccgacgcagaagcttgccgttccgttccccgcgccccggacgccctcgctcctcccgttcccatcgcaacccccctgccgctgcctcgcctctgcctcctccgacgaccgctgttccggcgccaaacgcagcggctgggactccgtgctgcaccagttctccgaggtcgccaagcgagtcgattcctactggaagtccctcgggaacgccgccgctgacgatcgcgtccgcgtcgtcggtggcgacgaggattgggattgggatcgctggcgccggcatttcgaggaaatcgacgagcaagagcgcctcctctcgattttcaagtctcagttaagccgtgccgtgtatttggagaattatgaagatgctgccaggcttaaggttgcatttgcagctacagctaacaacgacagtgttggaagagtgatgtcttatctcaatagagccataaaagaggagcggtatggtgatgcagctttcttaagagataaagctggcgctggacttgtgggttggtggtctggtatttcagaaggtgtaaatgatccacatggtctaattattcgcataactcctgagcatggaagatatgtggcgaggagttatagtccaaggcaacttgcaacttctgctgctggcattcctctttttgaattttttcttacaatggataaaaaaggtgaattcaagtcacaggctgtgtacttaaagcaaagaggggccttccatggacccccaacaacctcctctaaaacattggatgctgctgggagactgagttcagtggagtctactgaagacaaaagtgagctgtttgttgtgagtactgaagatccagaaaatggtaatgataggaatgatggctctgatcctgctgagggaatgcctggatttcagaatgtcttgaaagatatgattcctggggtaaaggtgaaggtattcaaggtgataactccagagaaagtagacaaggatctatctaatgtgattgagaagataattgaggacgaagacggagacgaagacgaagatgaagagatggaaaatgatgcagaaagtctagaactggaagagattaagtctgagactgaccaggagggagatgatgagattgaaataaatgctggtctgggaacttttgaacgtgaagaccagaatgagtttgctgtcaaaattgccattggtggtcttgttcagaaactttctggtaatctatcctctagagatttgcttcgagtccctgctatgctggagatgaaggggcgtggttcattttcctttactgttgaaaaagaagtcaatcagcaggttggtcttgacaaaggaaaatcttcatctgataaatcaactaagtttcaaggtcgacgcagagttgatcatgttatttttgaccttgcaaaattcattggcaggggaaagataccctcaaaggtgctgaaagaagtgggagaattgataaatctcactctaagtcaggctcagagccatcaccaattatctggctcaacaattttcaatcgcatcgaaataccagcttcgtttgatcctttaaatggtctatacattggtgcacatgggctttactcctctgaagttattcatctaagacgtagatttggtcagtggcaagaggacaatggggctaaggagccttcaaatattgagttttatgagtatgtagaagctttgaagctaactggggatccttatgtaccagctggccaggtggcatttcgtgcaaaaattggaaagaggtatcaattgcctcataaagggataatacctgaagagtttggcgtgattgctcgctataaaggtgaagggaggctggctgagccagggtttcagaatgcccgatgggttgatggtgagcttgtgattcttgatgggaagcacctaaaagcagggccggttgttggatttgtgtattgggcccctgggtatcattttttggtcttcttcaatcggcttaggcttcaacagtag

SEQ ID NO: 368 - DNA, 783 bp, Glycine Max
atggctttggttaacctttcttacatcggcattgtgacccttataacccttctggcttccaccgaggccagggtcccgggcgtgtacagcggcggcgcgtgggagaccgcgcacgccacgttctacggcggcagcgacgcgtcggggacaatgggcggcgcgtgcgggtacgggaacctgtacagccaggggtacggcgtgaacacggcggcgctgagcacggcgctgttcaacaacgggctgagctgcggtgcctgcttcgagataaagtgcgcgaacgaccccagctggtgccacgctggcagcccctccatattcgtaaccgccacaaacttctgccccccaaactacgcccttccgaacgacaatggagggtggtgcaatcctccccggccccacttcgacctggccatgcccatgttcctcaaaatcgctcagtaccgcgccggcatcgtccccgtctcttaccgcagggtgccttgccgtaagcagggagggatgaggttcacgatcaacggcttccgttacttcaacctggttttgatcaccaacgtcgcgggcgcaggggatatcgtgaggacgagcgtgaaagggtcaaagactgggtggatgagcatgagccgcaactggggtcagaactggcagtcaaacgctgttctggttggtcagtcactctccttcagggtcacagccagtgaccgacgcacctccacctcctggaacattgtacccgccaattggcaatttggtcaaacattcaccgccaaaaatttcagagtctaa

SEQ ID NO: 369 - DNA, 1287 bp, Glycine Max
atgggaagacactcttgttgctacaaacagaagttacggaaaggcctttggtctccagaggaagacgagaagctgctgaattacatcaccaaacatggtcatggatgttggagctcggttcccaaactagctggtttgcagagatgtggcaagagctgcaggttgaggtggataaattacctgaggcctgatttgaagagaggagcattctcacaacaggaagaaaacatgattgttgaacttcatgcagttcttggaaacaggtggtctcagattgcagcacagttaccaggaagaacagacaatgagattaagaacctatggaactcttgcctgaagaagaagctgaggcaaagaggcattgacccaaacacccacaagccactctctgaggttgagaacgaaaaggacatgatgccaccctcaaccgacaaaagcactcagaaagcgtctgtgggatccaatgaagtgagtctggttgatcatcaccagcaacaaccaaaaatcatgcctaattcatcatcagagagataccctcttgaagtttccacaactagttccacccaggaactgttcctagataggtttggtacccccaccacctgccaccaccaccacaacaacaacaacacttctgatgttgtaggatcatacttctccttccagcacttgaactatggaacaacaacaaacatgtccctctctgcaaaccccaacgcctctctttgttttgttccagcctccacttcttcagaccttaataacaattccaccataacctcctccatgctcccttcaattttcccaacacaacacgtgaagctccaatctaataacaacaacccttccatttcatctgatggggttcaaaactgggaaacaagtaacttaaataacagcaacagcacaaacaaaaacaatgggagtatgcagttacaaagctgcacaaacttcattgacaacacgtggggggtgggagagtctatgaaggttgttaacatcaacaaagatgctgatcaaatgcctctacaagcagaacaagaagatctgaaatggtctgagtatcttaataccccgtttattctgggaaacaacacagcgcagaatcatcaaattcatacctctcaatctatctatagtgaggttaaaccagaaacaggtttcataacagacgagtcatgtgctacatggcaccattatcagaatcagacaccagcttttcaactttccgatatatatagcaaggatctgcagagattttcagtgactttcggacaaaccctgtaa

SEQ ID NO: 370 - DNA, 765 bp, Glycine Max
atgggaaggtatcgaagccggagcaggagctatagcccccggcggcgaagcaggagcccaccggcaccgcgcggacggaaccgctatgtcgacgatcgctacggtgacagcaggtcttacagagaccgccgctcacctcttccttccggcttgcttgttcgcaatcttccccttgatgccaggcctgaggatcttaggatcccatttgagcgctatggtcctgtgaaggatgtttatctacctaaaaattactacactggtgagcctcgcggctttggatttgtgaaatatcgatatggtgaagatgcagctgaggcaaagcaacatcttaatcatactatcattggtggacgtgaaataaggattgttttcgctgaggaaaacaggaaaactcctcaagaaatgcgtgttaacactcgaggaagtggtcgatatggaggtggtagaaggaggaatcatactagatccccacgacgccgatatcgttcatattctcggtctccatcaccagctagggatgattcaagggacggcaggggtagggatgattattattctcctgagcgatcaagatcttattctaggtctctctctcccagtggtgggaaggactacaggaagtcccctcgtcttagggagaatggtcggagtcctaatgacaagaaggatcagacacccagcagatccgagagtcctaggggcaatgatcgtagtccttcaaggtctcgttcacggtcatacaggtatgaattttatttttattga

SEQ ID NO: 371 - DNA, 1038 bp, Glycine Max
atgggaatatatctcagcactccaaaaactgaaaagttttctgaagatggtgaaaatgactgtcttagatatggtttatcatccatgcaagggtggcgtgcaacaatggaagatgctcatgctgcatatactgatctggatgagtccacttcattttttggtgtctatgatggccatggaggtaaggtggttgcaaagttttgtgccaagtttcttcatcaacagttgttcaaaagtgagacatacttaactggagatataggagcctcccttcagaaagcctttttgagaatggatgaaatgatgcgtggtcaaaggggatggagggaattatcaatattgggggataagataaacaagtttactgggatgatagaagggttgatttggtctccacgaagcagtgatgggaattgccatgttgatgattgggcttttgaggaggggcctcattctgattttgctggaccaacttcaggaagcactgcctgtgttgcagttattagaaacaaccaacttgttgttgcaaatgctggtgattcgcgttgtgtgatatccaggaagggccaggcatacaatttgtctagagaccacaaacctgatcttgagattgagaaggaaagaatcttaaaagctggtggtttcattcacgtaggacgagtcaatggaagtttaaatcttgcaagagctattggtgacatggaatttaaacagaataagtttctttctgctgaaaaacaaattgtaactgccaatccagacatcaacactgttgagctttgtgacgaagatgagtttgtggtgttagcttgtgatggcatatgggattgcatgtcaagtcaacaactggttgattttgttcatgaacaattgcactcggaaacaaaactttctgccgtgtgtgaaagagtacttgatcggtgtttggcaccatcaactgccagtggtgaaggatgtgacaacatgaccatgattgtggtgcagttcaaaagacctgctcagtccagtgtaccagcagaagagtcctcttcaaactga

SEQ ID NO: 372 - DNA, 1248 bp, Glycine Max
atgggacttgtggagctttttggagtggcatctatgcccgtgatcaaagtactaataatcactgcagttggcttgcttcttgcactggataacgtaaatttgttgggaaaagatgcaaggatacaagtgaatcatcttgtgcattatgtgttcaatcctgcactggtgggtggcaatttggcggacacgattacttttgagaatgttgttttattgtggttcatgcccgtcaatatcctccttacgtttataataggttctgccttaggatggatccttatcaaattaacaagggctcccaaacacttggaagggctaatattgggtgtctgttctgcaggaaatttaggaaacttgcctataatcattatcccggctatatgtaaagacaaaggtagtccttttggagactccaatgtctgctatcaatatggaatggcttatgcttcactttctatggcggttggagctgtttatatatggacttatgtctacaacataatgagagtttccgcaagtgtagtcccaaaagatgattatagaactagctccttcagactggaggcttcaggagagttcctagaattcataccagaggaagaatcctcagaacctgaaaatccaccaaaggacaacatggatgattacactcttctgctttcttcaattgaatctgaggagaatgtgaagttaccaatctcagctaaaatcaaacaacaatttggaaaccttttagtcaactccaatttcagagccatattttcaccagcaactcttggagcgattgttggctttattgtaggagtggttccccagatacgtaaattgatgattggcggcgatgcttcacttcatgtgattcaagactctgttaccatggttggtgaagccgccgttccaattataacccttataatgggagcaaacctccttaaaggcttgaagggagcaaatacttctatttggacagttataggaattatagtagttcgatatattttcctgccaattttgggtattctagttattaaaggagcaacacaattgggtttggtgcaaccagatcccttgtatcagtttgtgcttctccttcaatatgcacttccacctgcaatggctataggcaccatcgcgcagttgtttggagctggtgaaggtgaatgttctgttatcatgctatggacatatgttttggcctcagttgcagtcactttttggacaacctacttcatgtggcttgtggcttaa

SEQ ID NO: 373 - DNA, 1659 bp, Glycine Max
atgggcaactgctgctccgacgtcgctggcggccaatctgccatcggcggcaccgccgccggccacctcaatccggccaacgctcccaacgacgccgtcgatcgcttcctcaggtctcgcggctacaacggcctcttctctcagatcgagctgtcgttttctgcttctggcttgcgtgatcgggatgtgctctccaagagtgatccaatgatggttctttatgcaagaggaaaaaatgcagcactcacagaacttggccggacagaagtaattctgaattcattaaatcctacatggattactaaacacactctcatatataattttgaggttgttcaggttttagtgtttcgtgtgtatgatgttgatactcagtttcacaacatagatgtaaagatgcttaagctagaagagcagcaatatctaggtgaggcaacctgtgcactatctgagataattacaaagtttgaccgatcaatgacattagatttacacagaagagaagattctatcagatctacccagtcccaaaactgtggaaagctcttggtgcatgctgaagaatgtgttagttcaaagactacaatagagatgattctcaggtgttcagatttggaatatagggatctcttctcaagaagtgatccctttttattgctatcaaaagttgtggaaggtggtagccatattccaatttgtaaaacagaagttataaagaatgatcacaacccaatatggaagccagtgttcttgaatattcaacaagtaggaagcaaggaaagtcctttgattatagagtgctataacttcaatagcaatggcaaacatgatttgatgggaaaagtgcagaaatctttggtggagctggagaagctttattcaggtggccaaggagaaaattttatttcgtctgctcctgcgggtcataattctcataacaaggtgttaaaaagccagttatttgtggacaaattttctgagagtatccaatatagtttcctggattacttggctgggggatttgaattgaacttcatggtggccattgattttacagcttcaaatggaaatccacgccttccagattctttgcattatattgatccttcaggacggccgaatgcataccagagggcagttttagaggttggggaggtgttacagtattatgattcagacaagcgatttcctacatggggatttggagcacgaccaattgatgctcctgtctcccattgtttcaacctgaatggaagcagccattgctgtgaggtggaaggcatccaaggaattatgatggcatacacgagtgccctgcttaatgtttctcttgcaggaccaactctttttggacctgtcataagcaatgctgcactgattgccagccaatctgtagcaaatggtggaagaaagtactttgttttgttaatcatcacagatggagtagtgactgatctccaagaaacaaaagatgctctcgttaaagcatctgatctaccattatcaatccttattgttggcgtaggaggagctgatttcaaagaaatggagattttggatgctgacaaaggagagaggcttgaaagttcatctggtcgcgttgcttcacgtgatatagtccagtttgttccattccgtgacgttcaaagtaggtattag

SEQ ID NO: 374 - DNA, 867 bp, Glycine Max
atggggaaaggaagagcaccatgctgtgataagactcaagtgaagagaggtccttggagccctgcagaagaccttaagctcatagccttcatccagaaatatggccacgaaaactggcgtgctctcccaaaacaagcagggctcctgcgatgtgggaaaagttgtcgtttgagatggatcaattatctaaggcctgatgtgaagagaggcaattttacaccagaggaagaggaaaccataataaggctacacaaggccttaggaaacaagtggtcaaagattgcatcaggtttgcctggtaggactgacaatgagatcaagaatgtgtggaacacccacttgaagaaaagattggctccaaaaaaagtctcagaacaactgagaaattatcagtggaagataaaatggacaaggattcagaaaaacaactgtccaacgaacttgttaacatcactgaggatccaaaagagtcatcagtttcattgtcttctgttgaatcaaacattcatattagaagaggtggataaaccaaaccacctgattgaaattccatgggagccagattatgatttttggaagttgttagatgatgataatagccttggatcttttcaatcaaatgaagtccaattagaagagggtgttcatgatgctgaagccaagaagtggtcccatgattttgaaaatgagtttggagtagttggtgggataaaggagtcaagcaaggatcatttcctaccaaagaactatgctgttgagccagaaatggaccacactcaagcatttgattttgatgacattgacatggcaaggccagaatctgaattagactttggttgtagattgaagcacaaatatgcagtgtaa

SEQ ID NO: 375 - DNA, 1410 bp, Glycine Max
atggggagtagaactacctggagggttgttggtgttgaagatgacaagggagctgaaagaggaatgccgagcttcaattctgagttacccaattccaattcatgctatacagaggggaacacaattgattcttttcgtgtttctgactttggagcatttgatcagtcatatcacatagaggatgctgttgacctcagtggaaacccagtttacaattcactaaaggtaaatagccaaacaatttctccgggttctgttcacattagtagccttggtcagttgccaatttcactcgaaaaaagcccattgacaaatcaaacagagccaccgcataggttgcgattacagaaggttcaatcatcaaatcctggcacaatattagttggtaatacagataactgggaggagtctaccatggctgatgccagtcccaggactgatatttctacagatggtgacactgatgacaagaatcatccgtttgatagaaatcaagcccttactgctgtttccgactctagtgacagatcgaaagataaatcagatcagaagactctccgcaggcttgctcagaaccgtgaagctgccagaaaaagccgcttgcgaaagaaagcgtatgtccaacagttggaaagtagtcgtttgaagctgacccaactagagcaagagcttcagcgagctaggcagcaggggattttcatatcaagctcgggtgatcaagcacatacattgagtggaaatggggcaatgcaatttgatgcagaatatgctaggtggctggaagagcagaatcgacaaattaatgagctaagagcagctgtaaactctcatgcaagtgacactgaacttcgcatgattgttgatggtatattggcacattatgatgagatttttaggctgaaaggtgttgcagctaaggctgatgttttccatttgctgtctggcatgtggaaaacacctgctgagaggtgttttttgtggcttggtggttttcggtcatctgaacttctcaagctgctggtaagtcaattggagcctctcacagagcagcagctgatgggtatcaccaacttgcagcaatcctctcaacaagcagaagatgcgttgtctcagggcatggaagcattgcaacagtcccttgcagagactttgtccaccggagcacctgcctcatctggttcatcagggaatgtggcaagttacatgggtcaaatggccatggccatgggcaagctagggacactagaagggttcattcaacaggctgacaatcttcgccagcaaactcttcaacaaatgcaccgtatactgacaactcgccaatcagctcgcgcactccttgctatacatgactacatttcgcgtctgcgtgctctcagttcgctttggcttgctcgccctagagattga

SEQ ID NO: 376 - DNA, 1242 bp, Glycine Max
atgggggttgtagaaggaagggggttggaaatgagacaatggcttttcctccgaagattctctctgtggtcgatgaagaaggaacctgacttagaatccgcactctcacgcaatcgccgttggatagtcaacaaccaaatcaagaacatcatcctccgctaccccaacaacgaaatccccatccataccctccagaacaagttcaaaaccctagatctccaaggcaaagcccttaactggctctccaagtacccttgctgcttccaaatccacgacaaccgctgccgcctcaccaagcgcatgatgaacctcgtcgcagaggaacagtccctcctcgattccctagagcccctcttcgctcgcatcttagctaaactcctcatgctatccctcaccaagagactcaccgtcctcaaaatcaacgaattcaaacgtagtttcggcttccccgacgattacatcctcagaatcgtccccaaataccctaatttgttccgaatcgtcaacgaaagcggcaggagaagctccatggccgttgagctgctgcattgggatcccgacctcgccgtctccaccatcgaagcatcggcgaagaagctcggcactccgccgcggttttcgtgctctttgccgtccagttgggtgaaatcatgggagaggtttcacgaatttgagtcaattccgtacttttcgccctattcggaatcgagagggttggtggagggatctaaggagatggagaagaggaatgttggtttggtgcatgagttgttgtcattgactctttggaagaagttttcaattgttaagttgggacattttaggagggagtttgttttgcctgataaattgaatgtgttgctgctcaagcaccctgggattttctatgtttcaaataagtatcagatttacactgtgcttcttagagaggcctatgttgggtctcagcttgtggataaggatcctttggtgattgtgaaggacaagtttggggagttgatgcaggaggggcttcacgagtacaatcagcggcggtgccaacttaatgttgaaaagaggaggaagaaaggggttcctttggttagtgtggatgatggtgcaaggggtagaaggagaagtcgccaagttgttgatgatgatgatgatggtggtggtggtggagatggtaaggtgggtaggttgtttgaccctgaagaaagaaaacggttttacagagttctttttgacgatgatgcttcttga

SEQ ID NO: 377 - DNA, 1074 bp, Glycine Max
atgggtagccttgaagcggaaagaacaacagtaggattggcagcaagagacccttcagggattctctccccatacacctacaatctaagaaacacaggccctgatgatgtttacataaaagttcactactgtggaatttgccattctgatctccaccagattaaaaatgatcttggcatgtccaactatcccatggtcccaggacatgaagtggttggtgaggtactggaggtggggtcagacgttagcaggttcagagtgggagagttggtgggagttggactcctcgtaggttgctgcaaaaactgccagccatgccaacaagacattgagaattactgcagcaagaagatctggtcttacaatgatgtttatgtcgatggaaaacccacgcagggtggctttgctgaaaccatggtcgttgagcaaaagtttgtggtgaaaattccagagggtttggcgccagagcaagtggcaccattactgtgtgcgggtgtgacagtgtacagtccactggtacactttgggctgaaagagagtgggctgagaggtggaatattggggcttggaggagtgggacacatgggggtgaagatagcaaaggcactgggtcaccatgtgactgtgataagctcttctgacaagaagaaacaggaggcacttgagcaccttggagctgatcaatatcttgttagctctgatgtcactgccatgcaggaagctgctgattcacttgactacatcattgacactgtgcctgttggtcaccctcttgagccttatctctctttgctcaaacttgatggcaagttgatcttgatgggtgtcatcaacacccctcttcaatttgttagccccatggtcatgctagggaggaggtcaatcacgggaagctttattgggagcatgaaggagacagaggagatgttggagttctggaaagagaagggtctgagttcgatgattgaagtggtaaacatggattacattaacaaagcctttgaaaggttggagaagaacgatgtgagatacaggtttgtagtggatgtcaaaggcagcaaacttgttgattag

SEQ ID NO: 378 - DNA, 1074 bp, Glycine Max; identical to SEQ ID NO: 377

SEQ ID NO: 379 - DNA, 6483 bp, Glycine Max
atgggtcgacctgagccatgcgtcctcttcgcccaaaacttcgttcatactcatctcgacgagtacgtcgacgaggtgatgttttcggagcccattgttattactgcgtgtgagtttctggaacagactgcgtcatcagctgctcaagcagtgacacttgttggggcaacttcacctccatcatttgcgatagaggtgtttgttcattgtgagggagagacaaggtttagaagactttgtcagccttttctctattcacactcttcgtcaaatgtactagaagtagaggctgttgttactagtcatctagttgtaaggggcagctatcgcagtctgagtttggttatatatggcaacacagctgaggatctgggtcagtttaacattgatattgatgacaatgcattgactgatcttgttgattctactgaggggaagcttgaagaccttccacctgcattacgctcaactaattttacaattgatgattcacgttcatctctgagggtgttgtctattccagttcctgcaacagatatttctgttgaagtcaatctttttctacagttgatgttaaaaattttggagttttcagagcttggggatgctgggcataaaattgtagatcctgtagtgtctgcaatcacttcttacatttccagtgacatatgtgaatcaatcggtgggagatatcagatgcagaagagatctgagaatttggaagagttgcacagtgttgttaatgagggaagaaaagagcttctagaggtttataaggttcttcacaaaaaatttaggagtggatcttctgagtgttcaccagatgccaattatcttgaaatggatgctgaaatgttggattccaaaactttggtggatatgtttaaccagtactttcattttcaacggcactcttcttgtataggagatcactgcctttctcagagtgagcatgccctattaatattgagcatggcttatttgctttgttctggtagagagagtggctttcagtttgttagtagtgggggaatggagcagcttgcagtgtttttttccaaggattggcaaaattctactactattatgctactgcttcttggtgttgtagagcgggctactaggtattcagttggatgtgaagcctttttaggttggtggccccgggaagatgaaaatataccctctagtatcagtgaaggttatagtcatttgttgaagttgatattgtcaaaacctcgtcatgatgttgcttctcttgcaacctatttgcttcaccgcttacgattttatgaaattgcttcaagatatgagtctgcagttctttctgtgctgggaaacatcggtactgttggcagggttacagatgttacactgaatatgctcagttctgctgaaattctgctcagaaagctcctgaaattgataaattcacgtggtccaattgaagatccttctcccatagcttgtgcaagcagatcacttattactggtcaaacagatggattgttgtcatataaaacaacttccagcttgattagctcttcaagttgttgcttttcagattgtgatattgattcccatttattgggacttttgaaggagaggggttttctttcattatcaactgcattgttgtcatcatctatactgcgtgtggagagtggccatgtaatggaaatcttcatggatgtcacatcatccattgaggccgtgattctatcatttcttttttgtcgttcaggcttgatattgctattgcaggatcctgaactttctagtacattaatccgtgctcttaggggcggtcaccgaggcaacaaggaagattgtattcctcttcgatatgcttccatttttatttcaaagggtttcttttgtagtccacccgagattggaatgataattgagatacatttaaaaatggttaatgccgttgatagtttgctttctttgaatccgcagtcggaagagttcttatgggttgtctgggaactctctatgctctcacgatcggattgtgggcgccaggcattattggctttagggaattttcctgagagcaggtgtcatccgccgtcgcccgccgccgtcgccgccgccgtccgccgcaaccgccgccgtctgccgccgccgccgtcactttccggcggctatttctccggcgaagccagggttaggctcgccttgggaagcgcgagccagtcggccaactcgcgtcagcaacggagcagccacgcgccgccaccgtcccgcgcgtcctccggcgcgtgcagtccacgcgccgccgtcccggcgccggaatcgcgccgcgcctccgccgttctcttgggtttcaccttgtgggtcaaaatggcttcccctggacctgttttctccttctccgggactccaaccatcacaactgctaaactcaattggaaaaattacccctcatggtctgcttccgtagaactttggtttcttggtcaaggacaccatgaccacttggagaaagcttccgattctgtttcaagtgacaaaagagccgaatgggagaagcttgattatcaactgtgtgctgtgttatggcaatcagttgagccggatattttggatatccttagatcatttaaaacgtgtcgttccttttggaagaaggctcaagaaatttttgccaatgatattcagagcttatttgatgcaaccatgaaggttacagcccttaagcaaaccagccatgacatgattgctcatgtgggtaaggctcgggctgccgtggaagagctgagaaagtttcttgtggctgattcattagaagaagtgaacaggaaactggacaagttttacatggtccttatcctgagaagcttacactcagactttgatcatgttcgtgatcaagtactcgctggggatcaggttccatccatggattctctcatcactaggcttctccgtgtgcctcacttatcgaaggatgaaaatcctactgatagtgtggagacgtcagcaatggttgcatcacgtggtagaggaggcggtcgcaacagcagaggaggccgcaatggaaggggtggacgtcctcattgcacctactgcaagaggatgggtcacacccaagagaattgttattcgttgcatgggtttcctgacaaggttgcacaggtttctagatcagagaaagcagagtctaagttctctgatgaggagtatcaggagtatttgaagctcaaatctgagagacccagcaaccaagctcaatcctcatctgtaccatgtttttcaacagcttgtatctctcaatcaattgaaggtcctagtccttggatactcgactcaggtgcctctgaccatatttctggtaataagtcttccttttcatccttttccttaccaaaaattcctcacctcgtcactgtagctaatggctccaaggttgcgtctcaaggaagtggtcaagtttcattgtctccttccttgaaattaaactctgttttattccttccgcagtgtccctataatttaatctcactaagtcaattaactcgttcgttaaattgttcagtaacctttactgctaattcttttgttattcaggaacatgggacggggcgactgattggagaaggacatgaatcacgaggactttactatttggaatccagtccacttgggtcttgttttgcaatctcaaaacccaaacttttgcatgatcgtctaggacacccaagtttatcaaaattgaagatgatggtccctagtcttaagaatcttcgagtcttagattgtgagtcttgtcaactaggaaaacatgtcaggtcgtcatttcctcaaactgtacaaagatgtaactcggctttctctaccattcattctgatatttggggaccaagtcgtgttacatcttttggttttcgatattttgtaaccttcattgatgaattctccagatgtacttgggtttatttaatgaaagacagatctgaacttttgcctatatttgtgtcattctacaatgaaattgagaatcaatttggaaaaacaattaaaattttcagaagtgataatgctaaagagtatttctctcatgatctttcttcttttctgtcttccaaaggtattctacatcaatccacatgtcctcacacaccacaacaaaatggtattgcagaaaggaagaatcgtcatcttcttgaaactgcacgctccctaatgctaaattcgaatgttccgatacatcattggggagatgcggtgcttactgcttgtttcctaataaatcggatgccttcttcttctcttgaaaaccaaattcctcactcacttgtctttcctcatgatcctttatttcatgtctctcctaaagtgtttggttgtacctgttttgttcatgatttgtctcctggtttagataaactctctgctaggtcagtcaaatgtgtcttcctgggttattctcgtcttcaaaagggttacaaatgctactctccaaccatgagacgatactacatgtctgcagatgtaaccttctttgaagacacacctttcttttcaccctccgtggaccattcttcatctcttcaggaagttcttcctattccttctccttatcccctagataactcaggccaaaatgtcagtattgttccatcttcctcaccaaattcacctgaagtcatcttaccacctctgactacagatcaacacaggacaaggcagattggatctccaatacctgaagcctctcctagtgattctcgtccttcttcaaccagtcctccactcatggatccgccctctccttccacttcttctcctcattctgattcacattggcccattgccatcagaaaaggtactcgttctactcgtaatcctcatcctatttataatttcttaagctatcaccgtttgtctccttcatacagttcctttgtttgttcattgtcttcccttgccattccttccactgtccgtgaggcacttgatcatcctggctggagacaggctatgattgatgaaatgcaggcccttgaaaataatggtacttgggagcttgttcctcttccccctggtaagacccctgtgggttgtaggtgggtctacactgttaaagttgggcccactggtgaggttgatcggcttaaggctcgtttggtagctaaaggctacacacaggtatatggcattgattactgtgatactttctctcctgtcgccaaactcaccactgttcgtctgtttcttgctatggctgctattcgtcactggcccctccatcagcttgatattaagaatgcctttctccacggtgatcttgaggaggatatttatatggagcaaccacctgggtttgttgctcagggggagtatggccttgtgtgtaagcttcatcgatctctctatgggttgaagcaatctcctcgtgcttggtttggtaaatttagtcatgttgttcacatgtttggactgaaacgaagtgaagctgatcactctgtattttattgtcatacatctcctggaaaatgtgtttatctaatggtctatgttgatgatatagtgattacagggaatgatgctactaagatcagccagctaaaagagcatctattcagtcattttcagaccaaagatttgggatctttgaagtatttccttggtattgaagtggctcaatcaggagatggtgttgtgatctctcagaggaagtatgcccttgatattttagaagaaacaggtatgcaaaattgtagacctgttgaaagtcctatggatcctaatttgaagctcatggcagatcaaagtgaagtttatcctgaccccgagagatataggaggcttgtgggaaaactcatttaccttaccatcactagacctgatatctcctttgctgtgggagtggttagccaatttatgcaaaatcctcatttggaccattggaatgctgtcatgcgtattttgaggtatattaagagagctcctggacaagggttgttgtatgaagacaaaggtaatacgcaattatcaggatattgtgatgctgattgggctggctgtcccatggataggaggtctacatcaggctattgtgtcttcattggaggaaatcttgtttcttggaaaagcaagaaacagacggttgtagctcggtctagtgcagaagctgaatatcgatcgatggctatggttacttgtgaactcatgtggattaaacaatttctgcaagaattgaggttttgtgaagagttgcaaatgaagttgtattgtgataatcaggctgctcttcatattgcctcaaacccagtctttcatgaaaggactaagcatatagagattgattgtcatttcattcgagagaagcttctgtccaaggagattgtcactgagttcattggttctaatgaccagccagcggatattttgactaagtccctaagaggacccagaattcagactatatgttccaagcttggtgcatatgatttatatgctccagcttga

SEQ ID NO: 380 - DNA, 441 bp, Glycine Max
atgggtctgagagacattggtgcttcactgcctcctgggtttcggttttatccgagtgatgaggaattggtctgccattacctctacaaaaagatcgcaaatgaggaagttctgaagggtaccttggtcgaaattgacctccacatatgcgaaccttggcaacttccagaggtggctaagctgaatgcgaatgagtggtacttcttcagtttccgggaccgcaaatatgcgacggggtttcggaccaaccgggcaactacatcggggtactggaaagcaacggggaaggatcgtacggtggtggatccagccacgcaagaagttgtagggatgaggaaaacactggtgttctacaggaacagagctccaaatggcatcaaaaccggttggatcatgcatgagttccgtttggagaccccacatatgcctccaaaggaatga

SEQ ID NO: 381 - DNA, 888 bp, Glycine Max
atgggttcttcttcttccatatggaccgtgtgtttgattttggcatcactggcctctgcagcactctgtgccaaccctcgtagaccagtggatgtacaatttggccgaaactacgtgcccacatgggcctttgatcacatcaaatacttcaatggaggttctgacattcagcttcatcttgacaagtacactggtactggcttccagtccaaagggtcatacttgtttggtcacttcagcatgtacataaagatggttcctggagattcagctggcacagtcactgctttctatttatcttcccaaaatgcggagcacgacgagatagactttgagttcttggggaacagaacaggacaaccttacattttgcaaacaaatgttttcacaggaggcaagggtgacagagagcaaagaatctatctctggtttgatcccacaaaagaataccacagatactccattctctggaacttgtatcagattgtgttctttgtggacgatgtggcaatcagggtgttcaagaacagcaaggacttgggagtgaaattccccttcgaccagccaatgaagatctacaacagtctatggaacgctgatgactgggccacaaggggtggtttggagaaaacggattggtccaaagccccattcatagcagcctacaaggggttccacatcgacgggtgcgaggcctcggtgaacgccaagttctgcgacacgcagggcaagagctggtgggaccaaccagaattccgtgacctcgacgcttcccagtggcgtagcctcagatgggtgcgccagaaatacaccatctacaactactgcactgacagaaaacgctaccctcaactctcccctgagtgcaaaccagaccgtgacatttaa

SEQ ID NO: 382 - DNA, 1248 bp, Glycine Max
atgggttggttttgttgcccagggaaatcaagcaaaaaatcggttaccgaagactacagcgacaccctcaaccagaaacccatcaatttcactgccacagatagtgtcaaagttgatttcagagtgaatgggaataaggaagatggttctaaaggtgatcaacttgctctggacgtaaagagtttaaatttgaaagaggaggcttctcaggatagaaaagataatggtaatcgggcacagacattcagttttaatgaacttgaagctgcgacgggaagttttaggttggattgttttttgggtgaaggaggctttggcaaggtttacaagggacacttggagagaataaaccaggttgtagctataaagcaacttgaccctaacggacttcaagggattcgtgaatttgttgttgaagtgttgacgttgagtttggcagatcaccctaaccttgtgaagttgattggattttgtgctgagggagagcagaggctattagtttatgagtacatgccattaggatctttggaggaccatttgcttgatattcggccaggtagaaaaccacttgattggaacacaagaatgaaaatagcagctggtgcagctaggggtttggagtatctgcatgataaaatgaagcctcctgtaatatatcgcgatttgaaatgttctaacattttgttaggagagggatatcatcctaaattgtccgattttggcttggcaaaagtaggcccaagtggtgataagacccatgtttcaacaagggttatgggcacatatgggtattgcgccccagattatgcaatgacaggccagttgacattcaagtcagatatttacagcttcggggttgttcttttggagcttattacaggccggaaagccattgaccatacaaaacctgccaaagaacaaaatctagttgcatgggcaagacccttgttcagagataggagaaaattttcgcaaatggttgacccattacttgaaggtcaatatcccgtgagaggcctataccaagctcttgccattgctgctatgtgtgttcaagagcagcctaatatgcggcctgtaatagttgacgtggttacagctctaaattacctagcttctcagaagtatgatccccaacttcatccagcacaaacttctagaaggagtccaccttctcagatgatgaaaagggatgatgatgatcatagacatattttaagcatcgagcatgagacagacagatcttaa

SEQ ID NO: 383 - DNA, 1266 bp, Glycine Max
atggtaagggattttaatattgcgaaaacagaagctgatattagttcttatgctggttatgtgggttctgcattcatgcttggcagatgtttgacatctttgttgtggggaactatagctgatcgctttggtcgaaaacctgtttttgttataggaattattgcagttgtcattttcaacacactatttggccttagcacaagtttttggatggctgttatcatgaggtttcttatgggaagtttaaatggtttgcttggaacagcgaaggcgtatgccactgaaatatttcgagaagaacaccaagctctaggactctcaactgtcagtgcagcttggggcataggtttaatcattggcccagcattgggaggctatttggctcagccagtggagaagtacccacatatatttccaaaagattccttttgggataagtttccatacttcttgcccaactttgtagtatcagcacttgcatttgtagtagctattggctgcatctggattccggaaacacttcacaaccacaattgtagcaatgaatccatagacgatgctgaaaatggaagtagtggggctggcaatgaaaagacaattcaaaagaatgaaaacctcctcctgaattggcccttaatgtcctctatcatcgcttattgtgttttctcacttcatgatattacttatacagaggttttctcgttgtggtctgttagtcctcaaaggatggggggtttgaactttacaagtgatgatgttggtaatattctttcaatatcaggtgttgcacttatcatttaccaacttaccttatacccatctgtggaaaaagctagtggacctattggtattgcccgcatctcagcgatgttatccatacctcttctacaaagctactccttcatagcattgttgtcaggcttggcactatacatagtgttaagtattgcttcaattctgaagaatattctgtctatcaccattgtaactggtttgttcctactacaaaaccgagcagtggaacaacaccaaagaggggtagctaatggcattgctgtgacaggcatgtctctattcaatgctattggccctgctgcaggtggtgctgtattaacttggtcacaaaagcgaatggatgcttcatttctcccaggcacccatatggtcttctttgccttgaacatagttgaagcacttggattattgatgttgttcaaaccattccttgctgaaaagaagaaaaggcactcagatcagttacactga

SEQ ID NO: 384 - DNA, 3024 bp, Glycine Max
atggtgaaatcaaattccaccaagtcaaagaaaccagaggacgttgacctcctcaaatccgacatcgcctccttcgcttccgagctcggcttgtccactaatcaaccacactcaggtttcaacgatgtcgatttccgcaaaatcaagccgaacaagcccccaaagaagaagcaacaaacgcccgaaaaactcacaccccaaaattcccagaatccaaagatcaaaactttcggcaaaaacaacggaccccacgagaagcgcaacgccaatcccgaaccgaaaccgaaaccccctgttctatcactggagaacggtgcccacagggaaaaggggttcaacaacaagtttaggaaccttccaaagcttcctttaatgaaggcaagtggtttgggagtgtggtttgaggacatgggtgagttggaagtgaaggtgattggggaagggaagaaggtggaggtgaaggatgtgggagagtggaaagggtttgtggagaaaaagagggaattgggggataggttgatggcacagtttgttcaggattatgagtcatcaagagggcagagtagtgatattaagatgttggtttcaacacagaggtctgggactgctgctgataaagtttctgcttttgctgtgcttgtgggggataatccaattgcaaatttgcgttctcttgatgctcttttgggaatggtgacatccaaggttggaaagcgccatgccttgacaggttttgaagcacttcaagaattatttattgcaagcttattaccagatcgtaaattgaagaccttgatacagcggcccctaaatcatgttcctgaaactaaagatggttactcccttctccttttctggtattgggaggaatgtttgaagcagagatatgaacggtttgttgttgcacttgaagaagcatcacgagacatgctacctgctctaaaaaacaaggcattaaaggccgtatacgtgctactgagtcggaagtcagagcaagaacgtagactactttctgcacttgtcaataaacttggggatccagataataaggcagcatctaatgctgactttcacttgtccaaccttttgtctgaccacccaaacatgaaggctgtggttattgacgaggtggattcttttctctttcggcctcatttaggacctcgttcacagtaccatgctgttaacttcttgagccaaattcgtctcacaaataaaggagatggaccaaaagtggcgaaacgtcttatagatgtatattttgcattgtttaaggttttgatttctggcgcaagcagcaatcataaatttgataaaagaagcaaggcaaaaccaaaagaagaaaaatcaaaagagtcatcagaatcacatgtggaattggactctcgtcttctatcatctctcctaactggagtgaatagagcatttccctttgtctcaagtaatgaagctgatgacattgttgacattcaaacgccagtacttttccaattggttcattcaaagaatttcaatgttggagttcaagcactgatgcttcttgataaaatttcatccaaaaatcagatagcaagtgatcggttttaccgtgctttgtactctaaacttttgcttccggctgccataaatgcatgtgcttatgctgttcttcaatcatctgtagaaatttctaaccgcgtggctgcattttctaaacgtctattgcagattgcacttcagcagccaccacaatatgcctgcgcatgtcttttccttctttctgaactccttaaagccagaccacctttatggaacatggtgttgcagaacgagtctgttgatgaggaacttgaacactttgaagatgttatagaaactgataatgagcctagcactgtatcaactaaacaaaatgatgatattggagttgttcagaatggtgaggatggcaattctgactccagttcttctgaaagtgaagatgatcttccagcatcttctgaagatgatgatttggatgatgatgcttcagaggatgcagattttttgcttgcaaagaatgaaaaagaacataagaaaccaaaaaaatcaaaatctgtatctgataaagaaggtcagcagtcacaattatctgtcaagaagtcttcccttcctggaggctatgatccacgacacagagagcctttgtactgcaatgcagaccgtgtaagttggtgggagttaatggtgcttgcttcacatgcacacccttcggttgctactatggccaaaactcttctttctggggccaacattgtctataacggaaatcccttaaatgacctctctatgactgctttcctggacaaattcatggagaagaaagcgaaacgaagcacatggcatggtggttctcagattgaacctgccaagcagatggatgttaacaaccaattgattggagcagaaattcttttactagctgaggaagatgtacctcctgaggatcttgtcttccacaagttctacacaaacaaaatgagttcctctactaaaccgaagaaaaagaaaaagaagtcagctgatgaggaagcagctgaggagttgtttgatgttgatgatggtgaggttgatggaggggatgagagtgacaatgaagagattgagaacctgttggattctactgatccaactttaggaccagacagtgactatgattatgatgatttggatgaagtagctgatgaggaagatgaggacttgattggtgatgttagtgatgcagagatgaatatggatataccctctgatatggaagaggaagaggttgatgcttctccacctgatgatgatgacattgatattcaggttggagatgttgatgatgcctctgatggtgatgaggaggaagctggcaaaagaaaacgaaagcatgaaagtggtggtaagaaaggtgtatctccatttgctagttatgaagagtttgagcatctaatggaagatgatgaccatgctgagaagaaatcttatcccaagaaaaccaagtctaagaaaagaaaaggttaa

SEQ ID NO: 385 - DNA, 363 bp, Glycine Max
atggtgcagcgtctcacctaccgcaaacgccacagctatgctaccaaatccaaccagcacagagtcgtcaagactcccggtggcaagcttgtttatcagaccacgaagaagagggccagcggacccaagtgccctgtcactggaaagaggattcaagggattccacatttaaggccagcagagtataatagatcaaggttacacagaaaccgaaggactgtgaaccgtgcatatggtggtgtgttgtctggcagtgctgttagagaaagaatcattcgagctttcttggttgaagagcaaaagattgtgaaaaaggtcttgaagatccaaaagacaaaggaaaaacaagctttgaagggctga

SEQ ID NO: 386 - DNA, 723 bp, Glycine Max
atggtggagccagcggtgagtggagctaagaatgtgatcatagctgctgcagaggctaaagttagacgtgtggtgttcacctcatccattggtgccgtctatatggaccccagtaggagcatcgatttggtggttgacgagtcctgttggagtgatttggaatattgcaagaacaccaagaattggtattgctatgggaaggctgtggctgaacaagcagcatgggacacagcaaaagagaatggggtggacttggttgtagtgaacccagttttggttcttggaccattactgcagcccacaatcaatgctagtacaattcacatcctcaagtacctcactggctctgctaagacctatgcaaatgccacacaggcttatgtgcatgttagggatgtggcattggcccacatacttgtttatgagaagccttctgcctctggtagatacctatgtgccgaaagctccctccaccgtggagaattagttgaaattctcgccaagtatttcccggagtacccagttcccaccaagtgttcagatgaaaagaatccgagagcaaaaccctacactttttcaaatcaaaagctgaaagatttgggattggaattcactccagtgagtcagtgtctatatgaaacagtgaagagcctgcaggagaaaggccaccttccagttcctgcaaagcagcaggaagaagattcaactaccgtgaaatcctaa

SEQ ID NO: 387 - DNA, 1476 bp, Glycine Max
atggtggcaagttctagttcagaaggaacaggagtacccctattgagagcatctgataataatggaagagatcaaaacacaagatccccccaagctgagggatggtggaacaaagtgttggacatggaagaggccaagcaccaactcttgttttcactgccaatgattcttaccaacttgttctatcacttgatcattttggtttctgtcatgcttgttggtcaccttggtgagcttcagcttgctggtgctactcttgcaaattcatggttcagtgtcactggcgtggcagttatggttggtttgagtggggcactggaaacactctgcggacaaggatttggtgcaaaggaataccaaatgctgggaatttacctacaagcctcttgcatcatatctcttattttttcaatcattatatccattatttggttctatacagaacccatcctagtgttgcttcatcaatctcccgacattgcaagaacagctgcactttatatgaagtttcttatcccgggagtgtttgcttatagcttcttgcaaaacatcttgaggtttctccagacacaatctgtagtaattccattggttgtactctctgctcttccaatgctggttcatattggtgttgcatatggcttggttcagtggtcaggtctgagttttacaggtgcaccagttgctgcttctatttcactatggatatcattgctattattggccttgtatgtaatgtatgctaagaagttcaagcagacatggaaaggattttcaacgcattcatttcgttacgtatttacaaacatgagactagctctgccctctgctgcaatggtatgtttggagtattgggcttttgaagttttggttttcttagctggactaatgcccgactcacagataaccacttcgttgattgcaatatgtataaacacagaattcattgcctacatgatcacttatggtctcagtgcagctgcaagcacaagggtatccaatgaattgggagcaggcaacccggaacgagctaaacatgcgatgagtgtcacactgaagctctctctcctccttggattatgttttgttttggcacttggatttggtcacaatatctggattcagtttttcagcgacagttctacaattaaaaaggagtttgcttcagtgacacccttgcttgccatttctatattacttgatgccatccaaggtgtcttgtcaggggtgtccagaggatgtggctggcagcacttggctgcttacattaaccttgctacattttatcttattggtttgccaatatcatgtttcctaggatttaagaccaatttgcagtacaagggtttatggattggtctgatttgtgggttactttgtcaaagtgggactctcttccttttcataaggcgtgccaaatggactaaattggatctctctagggacaatgataaagaacggcctcttgttgtttaa

SEQ ID NO: 388 - DNA, 1344 bp, Glycine Max
atggtggtgcctgagtctcagatgaattcccaaaacgaggtagaatcgccgctacaattggaggagcagcaacaacaacaaaacaacaacaacaacaagaaccacccattctcatcactaggaagacaatcttcttcaatatactcgctcaccctcgacgagttccaacacactctatgggagaatggcaagaattttgggtccatgaacatggacgagttcctcagcagcatatggagtgcagaagagaatcaagttttgaacaattccgtctctaaccacaacaacttgtctttagaagcttcaacagagaaaggtgtgataaggaaggaaccaagccttcctcggcaaggttctctaacacttcctgcacctttgtgtaggaaaacagtggacgaggtttggtctgagatacacaaaggacaacaatctcaacaacaacagcaacagaacaataacactaacaacaattgtggcagtaataataataataatgtacagaataccgaatctgcccctcgccaacctacgtttggagagatgactttggaggatttcttggttaaagctggggtagttagggaacagggtggaatggctgcaatgcctgttcaagcttcagcacatcagcatgtgcaacaatatggcatgtatccaaataacaaccctacaatgggggcttcttttgtcggtaggccggtgatggggatggccggtggcgtccgtgttggcagtggtggtagaaatgtggttgcaccgccttaccaggcggtgcctcagggtggtgttggtgttggtgttggtggtgcaattgcggagtcttcagggtatgctggaaatggaaagagggatgttgggtatccaccgggggcgccgggggtttgctttggagggagggtggtgaatggtggcggtggctatgcggcagtgagtaatatgggagtggtggcgccggttagcccggtttcgccggaggggataggaaccggcgaaaactctggtgggcagtttgggatggacatgagtatgttgagagggagaaagagggtgttggatggtcctgtggagaaggtggtggagagaaggcagaggaggatgatcaagaacagagaatcagcagccagatctagagcaagaaaacaggcatacactgttgaactggaagcagaattgaaccaattgaaagaagagaacggccaacttaaactagctctggccgatcttgagaggagaagaaagcaacagcatttagatcaggaagtgaatggaagagttcaaaccaacgcccagaaggccaaaaagaaattgagatcattgagaaagaccctaagttgccctttatga

SEQ ID NO: 389 - DNA, 1563 bp, Glycine Max
atgtacactcccaacgccgattccggcacggcgccgcatccgcgccccaccatcacgctccctccgcgtccctccgccgaggccttcttctctgccgccggcggcgccagccccggccccatgaccctcgtctccagcttcttcggctccgatgccgctgccgactgccgctccttctcgcagctcctcgccggcgctatggcctccccaatggccttctccgccgccgcagcatccgccgccgacaactccggcaaggacgacgatgggccccacaaggggttcaagcagagcagacccatgaatttggtcattgctcgttcccctgtcttcactgtcccacctgggttgagcccttctgggtttcttaactcccctggcttcttttcccctcagggcccctttgggatgtcccaccaacaggctttagcacaggttacagctcaagctgtcctagctcaatctcatatgcatatgcaagctgattaccagatgccttcagtaacagctcccactgaaccacctgtacagcagctgtcttttgctctaaatgaagcttcagagcagcaagtggtatcatgtgtatcagaacctagaaatgctcaacttgaagcaccggaactctcacaggctgataagaaatatcaaccatcttcccaggccattgacaaacctgcagatgatggctacaactggcgtaagtatgggcagaagcaggttaagggtagtgagtatccacgaagctattacaagtgcacacatctgaattgcgtcgtgaagaaaaaagttgagcgtgctcctgatggtcacataactgaaattatctataaaggccagcataatcatgaaaagcctcaggcaaataggcgtgccaaagataatagtgattcaaatggaaatgtaactgttcagcccaaatctgagtcaaactcacaaggttgggttggacaattaaacaagttaagtgaaaacattcctaattcttcagttcctgaaagtgaccagacctccaatcaaggggctcctaggcaacttctacctgggtcaaatgagagtgaggaagtgggtattgtagataatagggaagaggcagatgatggcgagccaaaccctaagagaaggaatactgatgttggagtttctgaagtacctctgtctcagaagactgtcacagaacccaaaatcattgtgcaaacaagaagtgaagttgatcttttggatgatggctacaggtggcgaaagtatggccagaaagtggtgaagggaaaccctcatccaaggagttattacaaatgcactagtgctggatgcaacgtgcgtaagcatgttgagagagcttcgacggaccccaaagctgtcataaccacgtatgagggtaaacataatcatgatgtacctgctgctagaaacagcagccacaacacagctagtagcaattcaatgccattaaaaccgcataatgtcgtgccagagaagcatcctttgcttaaagataaggattttggaggtaatgaccaaagacctgtacatttgcgcttaaaagaagagcaaattatagtataa

SEQ ID NO: 390 - DNA, 363 bp, Glycine Max
atgtatatatatatatatagagtcgaggcttgtttattcaactccatttgtgataacatgaacatgggttcctctgctgcagattcagcgtcgtggtactgtgccatggtgttgttggccacgatactgttggggtcaataagggaaagcaccgtagcagaagaaggtgagcctataaaagggaacaacctccttcaacgaccgtgtgatgaaatatacgttgtgggagaaggggagaccctgcacacaatcagtgacaagtgcaatgacccgtttatcgtggagcggaacccgcatatccatgaccccgatgatgttttccctggccttgtcatcaaaatcacccccatccaccaatactaa

SEQ ID NO: 391 - DNA, 876 bp, Glycine Max
atgtatcgaacggcggcgaagcggttggtgagcggtgcaagatactactatactggcaaggttgggctcagattccggccttctcagatattgataccctcttctcgcttttccacatccgagactcaaccacttcccattcccgtcgccaccgaaaccgaaacccctaactcttcagattcgtccccttcttcttcatcttcctcaacagccacaaaacccagagccaagtacgaggaccaacaaactcgcgtgcttcaggcctcgctctcttacgtcttaaagttggggtggacagaagctgctctagttgcaggagcaagggatgttggtctttcaccatctatcgttggatctttgcccagaaaggaagcaacactggtcgagtatttcatggacggctgcttacaaagacttgttgataaaattgactcagatgagagtttaaaaaatttgacaccaagtgactgcatctctaagcttatcagatttcgtttagaaatgcaagctccatatatatcaacatggccccaagctcttagcatccaggcacaacctgttaatgttcctacaagttttaagcagagggcagtgcttgtggatgagatctggcatgctgctggtgataatgcttccgacattgattggtatgccaagcgcactgtccttggaggaatatactcaacaactgagatttatatgctgacagatagctctcctgatttccgtgatacatgggctttcctggatgctcgagtgaaagatgcctttgatataaagaaaaccattcaagaggcacagtatttggcagaagctgtcagtaccgggctggggaactcctttcaagggtttgtcgggaaagttttccagagatga

SEQ ID NO: 392 - DNA, 873 bp, Glycine Max
atgtcaatggctgcgactctcactgctgtaagaattcccactttccaccaacgccatctcagaaaacatttcactgcaccttcttcttccttacgcctcctcaatctcgcaaagatggaaggaagtgagatcagtgagcaagtgggagaggatttgggagcaaagaagaaagtttttgtagctggagccactggtagcaccggcaaaagaatcgttgagcagttactcgcaaagggctttgctgttaaggctggggttagagacgtcgacaaggccaagacaaccctttcatctgccaacccttctcttcaaattgtgaaagctgatgtcacagagggttctgataagctagctgaggccattggtgatgattcagaagcagtagtgtgtgccacaggctttcgcccggggtgggatttgcttgctccatggaaggttgacaattttggcacagtaaacctcgttgaagcatgcaggaaacgtaatgttaacagattcattcttatcagttccattttagttaatggagctgctatgggacaattattcaatccggcttacatctttcttaatgtttttggactcaccttagtagcaaaactacaggcagagaaatatatcaggaaatccggtataaactacacaataataagacctggtgggttgagaaacgatcctcctactggaaatatagttatggagcctgaggacaccctttatgaaggttccatatccagatctttagttgctgaagtggctgtggaggcattggcttatcctgaggcatcttataaagttgtggaaatagtgtctcgccctgatgctcctaaacgcccgtaccatgacctttttggatccataaggcaacaataa

SEQ ID NO: 393 - DNA, 486 bp, Glycine Max
atgtcaatggcttctccttcttcaagaaaccaaacgtcgtcgccgcgttcgtactcctcggcgttcgcgtccacgtccacgtccacgtcgtcgactagtttctctcccgtcagagtgcaggaacaccgtccgttgccgtcgaagagtgagaggaacaaagacgcggtgtcgtcgtcgagcgagaagaggacgtgcatgtgttctccaacgaatcatcctggctcgttccgttgcgcgtatcacaaacagttagcggagaagcagaagcagcaaacgacgtcgttgagttgtcggaggctgaaccttcttagatcggcgatgaagaactcggtggtgagaatcggaggagtggaaggtgatcagattgtgaggagagcgttgacgaccactctcattaggccctcctctcatcacttgcgtcgccgcgaaacctttcagcccaggcccactcgcctctccctcatgtccaaagcccaagatcactga

SEQ ID NO: 394 - DNA, 2142 bp, Glycine Max
atgtcagatgacatgctcattcatttctcatccaactcatccaaccaatcagatcagtctctgcctacaaagattgcaaagttggaagctcgcatggttggtaagggttcctccacgactgctcagcaatcaggttggtcctctgtgtccgttccttctgctgggaaattaggtggagctgctgaaaatttggctgaaccatccacttccagtgattctgatgatgataatggtggggaattcttaatacaagccaacactcagaaacgccaaaaatttcaagaagatggcagcgcaagtgtttttgaacgtgttgaggttgttactgatgcaaggcaaatgagtttggagaccatggagacaaaaattaatgttgatgcgaatagaaagaaacatggccgtggaagagggagttctggttcaggtagaggccgtggttccagagttactgatcagaccaaaacacaaatttctcctccaacagttttggcttcaaatggtcagattgagagtgtataccataagctgataggaaatttgttgcaccaatcttggtacccgtttttgctgcttggttttcttgaatggttactcaatatcagtgtaatagctcatatttatttgcaggatggtagacccagtgatcagtttcataggaataattctgcttcactagaggaggacgttgcatctttagaagcaaaagttgttgcattggaggaggaattgcgtaaatcaaagcaagagaccgctgattatcaaaatctttatcgacagctagaaaaggaactgaaggagctgaatgatcatgaacagcaaatgaagcctaagagaatgaaaataatatctgacttactgatatctgtttcaaaggctgagagacaagaagcaaggttgaaagtacggcaagactcattgagacttgggaatgttggtgtaatcagagctggaactgtcatatccgagacctgggaagatggtcaagctttaaaggatctgaatgcccagcttaaacaactaatagaaacaaaggaggcaatcgagcggcagcgcaaattgtttaagaaaaaacaatctgataagagtgatggaatagatgcagaggctggattaccagaagatattctaattcatgatgagatctacaagtctcgattagctagccttaaaagagaagaagaaattattttccgggagagggaacgatatgaaatagagaaggggaggttaattcgtgaaatgaaacgtatacgggatgaagatggttcacggtttaacaactttcagattctaaatcatcgctatgcccttcttaaccttcttggaaagggaggattcagtgaggtgtacaaggctttcgacttggtagagcatagatatgttgcatgcaagcttcatggtttaaatgctcaatggagtgaagagaagaagcaaagctacatacgccatgcaattcgggagtataatattcacaagactcttgtacatcgtcacattgttcgtttatgggacatttttgagattgatcaaaacacattctgcactgttctagagcattgtagtgggaaagatcttgatgctgtcctcaaagcaacacctgtattacctgagagggaggctaaggtcatcatagttcaaatttttcaaggccttatttacatgaataaaagaacacagaagattatccattatgatttgaagcctggaaatgttctgtttgatgagcttggtgttgccaaagtgactgattttggtcttagtaagatagtggaggatgatgtgggatcccaaggtatggaacttacatcccaaggagctggaacatattggtatttacctcctgaatgctttgagctcagcaagacacctcttatatcatcaaaggttgatgtctggtctgctggaattttgtattatcaaatgctctttggccgacgtccttttgggcacgatcaaacacaagagagaatacttcgcgaagacacaattatcaaggcacgcaaagttgaatttccttctagacctaccatttctaatgaggcaaaggattttattcgacggtgtctaacatataaccaggccgagagaccagatgtattgaccattgctcaagacccatatctcactttctcaaaaaagtaa

SEQ ID NO: 395 - DNA, 1023 bp, Glycine Max
atgtcattgcctaccaccactagtggtcactcatctctttactctgcatttacattgccaagaaccactcaaattcacccaaccttgttttctcccaccaccaagttattttcttccagaagcccctcatattcaggtgtttcccattgtttctcaaacaccctttcgccaagaccgctgccttttgctgttaaggcttcatctggggttggctcagaagcatccaaacaggagaatgacaatagtgaagaagaagaagaggaaccgtatgaagagtatgaggtggaaattgagcagccttttggactcaaatttgcaaagggtagggatgggggaacttacattgatgctattgcaccaggaggatcagctgataaggctggagtcttcaatgttggggataaagtaattgccaccagcgcagtttttgggaccgaaatttggccagctgctgaatatggaaggacaatgtacacaattcgccaaagaattggcccattactcatgaaaatgcagaagagatatggaaagaacattgattctggtggtgagttaactgaaaaggagattatcagagctgagaggaactctgggtttatcagtaacagagtgagagaaattcaaatgctaaatgctttgaggaaaagggaacagaaagagcgcagggaaagggatttgagggaaggattacaactgtataagaatggaaaatacgatgaagcactagagaaatttgagtctattttgggatcaaagccagaacccgaggaagcagcagttgcaagttacaatgttgcttgctgttactctaagctaaaccagattcaagctgcactttcttcactggaagaagctctgaatgctggttttgaagacttcaagagaataagaactgatcctgacctggctaacgcaagggcatcagaggaatttgatcctttattgaaaagatttgatgaatctttcatcaatgagaatgccatcaatgccattaaatctctttttggatttggtaagaaataa

SEQ ID NO: 396 - DNA, 489 bp, Glycine Max
atgtccgatgctccggcgagtccatgcggcggcggcggcggaggcagccacgagagcggcgagcacagtccccgctccaatttccgcgagcaggaccgcttcctccccatcgccaacatcagccgcatcatgaagaaagcgcttcctcccaacgggaaaatcgccaaggacgccaaggaaaccgtgcaggaatgcgtctccgagttcatcagcttcgtcaccagcgaagcgagcgataagtgtcagagagagaagaggaagaccatcaacggcgacgatttgctttgggctatgaccactttaggtttcgaggagtatattgatccgctcaaggtttacctcgccgcttacagagagattgagggtgattcaaagggttcggccaagggtggagatgcatctgctaagagagatgtttatcagagtcctaatggccaggttgctcatcaaggttctttctcacaaggtgttaattatacgaattcttag

SEQ ID NO: 397 - DNA, 963 bp, Glycine Max
atgtcgacatctgataagccagaagaggtggaaaggggtagcaaggatgaaaagcacaaggaagatgatcaagaggaggggaagggtggattcattgagaaggtgaaggatttcattcatgacattggtgagaagattgaggaagctattgggtttgggaagccgagtgccgatgttactgcgatacacattccatcaattaatcttcacaaggcagatcttgttgttgatgtgctcatcaagaacccgaatccggtgccgatccctctgattgacatagattacttggttgacagtgatggaaggaagctagtttccggattgatacctgatgcgggtaccatccatgcacatggagagcaaactgtcaaaattcctgtcactttgatttatgatgacatcaagcaaacatatgctgatattaaacctggaagcatcattccttatagggtgaaggttagtctcatttttgatgttcccatcttgggaaggctaactctacctttggagaaaactggagaaattcccataccatacaagcctgatattgatcttgagaagattcattttgaaaggttctcttttgaagagacaattgcaactcttcacttgaagttggaaaacaagaatgattttgacctcggcctcaacgcgctcgattatgaggtctggcttggtgatgttagcattggtggtgcagaactcaccaagtctgctaaaattgaaaaaagtggaattagttatattgatattccaattaccttcaggcctaaggattttggctctgcactatgggacatgattagaggaagaggaactgcttacaccataaaaggacatattgatgttgacactccctttggagcaatgaagttgcccatcagcaaagaaggtggtactacccgtcttaagaaaaagaaggaagatcgtgattatgatgatgatgacgatgatgaggaatga

SEQ ID NO: 398 - DNA, 963 bp, Glycine Max
atgtcgacatctgataagccagaagtggtggaaaggggtagcaaggatgaaaaacacaaggaagatgatcaagaggaggggaagggtggattcattgagaaggtgaaggatttcattcatgacattggtgagaagattgaggaagctattgggtttgggaagccaactgctgacgttactgcgattcacattccatcgattaatcttcacaaggcagatcttgttgttgatgtgctcatcaagaacccgaatccggtgccaatccctctgattgacatagattacttggttgacagtgatgaaaggaagctagtttctggattgataccagatgcgggtaccatcggtgcacatggagagcagactgtcaaaattcctgtcactttgatttatgatgacatcaagcaaacatatgctgatattaaacctggaagcatcattccttatagggtgaaggttagtctcatttttgatgttcccatcttgggaaggctaactctacctttggagaaaactggagaaatccccataccatacaagcctgatattgatcttgagaagattcattttgaaaggttctcttttgaagagacaattgcaacgcttcatttgaagttggaaaacaagaatgatttcgaccttggcctcaatgcgctcgattatgaggtctggcttggtgatgttagcattggtggtgcagaactcaccaagtctgctaaaattgagaaaagtggaattagttatattgatattccaattaccttcaggcccaaggattttggctctgcactctgggacatgattagaggaaggggaacaggttacaccatgaaaggacatattgatgttgacactccctttggagcaatgaagttgcccatcagcaaagaaggtggtactacccgtcttaagaaaaagaaggaagatcgtgattatgatgacgatgacgatgatgaggattga

SEQ ID NO: 399 - DNA, 1893 bp, Glycine Max
atgtcggctcgattgatgaagaaggttctgaacgaacagcatcaccttccgcaacacgtgagcggagaagaagaagaagaagaagaagagaacgattctgaacccatcactcgttcctccatcaaccccttcgacctcctcaacgacaacgattctgagcccgaaaaccagggagatgagttgatgtccaccaatgaaaggttggcgagttatgatgatgaagaggagtcatcttcattgaaacctactgctgaggtttctacatcaaacccaaaatcgaagaaaaagaaaaagaagaagaacaaggatagtgctgttgcgaataaaacgggagaagataaagaattggacttgattctagaaaatttatctctgaatgtcaactcttcagctgagcaacctgtttctaccaaagacaaaaataaatctgttaaacagcaagcagcctccatattgcaagtggatcctaaatgtttgaatgcagaaaatgagctgagaagaatatttggatctaaggttgtgaaatcatttgtgagtagcaatcaagtgggcagttctaggcagatgcgaggggtgagggggcgtgtacattataatcttaaaaagagtgttcttgtcactccatcagacagttggctccgctgtgatgattctttgtccatgcaatttttggagataaaaaatggatataactatttcagatatgtacactcgccatcctactcccaatctcagagagcatttgaagctgccaaagcaattaatgacataaatggcatagcgagcatattacagcaccatccttatcatatagattcccttctaacaatggcagaatattttgcggtattgggtgaacaacagatgtctgcagatgctattgccaggtgtctatatgcccttgaatgtgcatggcatcccatgttcaatccattgcagggaaattgccggctgaagttcaaacatgatacaaacaaacctatattcacagctcttttcacccacatgaaaaacttggacaggcgtggctgtcatagatctgccttagaggtctgcaaattgttgctttcgctagattctgatgatcccatgggggctattttctgcattgactactttgctttaagggctgaggagtatgcatggctggagaagttttctgaagaatataaaagtgataactccatttggttgtttccaaacttctcttattcccttgccatttgtcggttttaccttgagcgtgaggcctgcaaagatgattgtatggatgctgaaaaggcttcttcatctgatcttatgaaacaagcattgatgcttcatccttcagtcataaagaagctagtcgcaaaagtaccattgaaagatcgcacatggacagatattctcaagcatgcttttttctggtcagatcaaacaggaattccatctcaagatcacttgattaatatatatgttgagagaaattatcttatatggaggcttcctgatctgcaaaaactgcttagtggtgctgcaaaactagtgattgaaacacttgaaagtaataaaagtgaacttaaggattgggcttgtgtcagaaaagaagcattttcatctgagaaaaatgagtatggacatttgttggtatccgagttctctgattcactttcatcgattcctcgagaaaatctgcaacaatttatgggtgttccaaggatgatggagggtatgcaggatgagaaccaatttgctaatctgcctggcaatggccatgctcctcgtggtgttgcaaataggaatgcattagctgtcttgtttgagtcaatgctgccgtgggttacttacgaggatggagtggatggtgaacctgatgataaccaacacgatgaccacaggcaagacaatcaatga

SEQ ID NO: 400 - DNA, 2028 bp, Glycine Max
atgtcgtccgagatcgaggttgtcgaggaggtgcagtcccgcgacgagcaatcggcggcgtctggcggcggcggcgatggcatgggggcggaggagagcctccggaacgacgtgtacacggcggcgtcgtacgggatttggagaaactgcagagattggtggagcaagagggttgccccgtcaccgagcccgacgggttgggatactacgcgcttcagtgggctgctctcaacaatcgcactgccgctgctcagtacatcattgagctcagctcagctcagctcagctcagctcaggttggcttgtaggtcatgtttgtgttatggaaatggaaatcgaatgtggtgtttgtttgttttgcaattgaatcatgggggagatgtaaatgcaacggatcatactggccagacagccttacattggagtgcggttcggggtgctattcaggttgcggaacttttactccaggagggtgctcgagtgagtgctgccgatatgaatggatatcagacaacgcatgttgctgcacaatatggtcagacagctttcctttaccacattgtttcaaaatggaatgctgaccctgatgttcctgataatgatggaagaagcccattgcattgggctgcttacaaaggttttgccgattctatacgtcttctgttatttcttgatgcacacaggggacgtcaagataaagagggttgcactcctcttcattgggctgctattaggggcaacttggaggccagtaccgtgttagtacaggctggcaagaaggaagatcttatggtgactgataatacaggcctgactccagcacagcttgcttctgataagaatcacagacaagttgcttttttccttggaaatgcccgaaggttgcttgacaaacgctgtgacgggaacagccgccttggaaagatttccaaattaggacttgctcctgtcctttggtgcataattcttgtgctgttggttacgtatattcattcggtcatcttggcaacaaaaatgccaaagatgacagctgcagcaggccttcttgcatggtttggagttttacttgcaagtgttggtttggtgatgttttacaggtgtagcagcaaggatcctggttatatcagaatgaatatgcatgacactcaggatacaaaagatgatgagcctctattgaagattgagataaataatcctgctttgctagctggaaactggtcccagctttgtgcaacatgcaagattgtcaggcctcttcgagcaaaacactgttctacctgtgatcattgtgtggaacaatttgatcaccattgtccttgggtatccaattgcattggcaagaagaacaaacgggatttctttgtttttcttgttcttgaagtttcagcaatgttggttactggtggagtttgtcttacaagagtgttaactgatccacttgcacctcagtcatttggggcatggattcagtatgttgctaacaatcacactggtgcaatatcatttctaatagccgattttttcctcttcttcggtgtgtttactttgacagttgtgcaggctagtcagatatcacgcaatatcacaacaaatgaaatggcaaatgcactgcggtataattacctcagaggtccaggtggtagattcagaaacccatatgatcatggtatcaagaagaactgttctgatttcttgatcaatggttacaacgaagatattgagtgcattgaagaattaggtagctcagaggagggtataggaatgatgcacatggcaagaagctcgaacttagcaaatggagactcgcataaccattccgaatatgcaaggggcaatggaaatggccatcatgttattaatgtgaattccaattccaacagtacccactccaaaacaaatcatggtcatgttcattctacgcattgtagccataataataaccatggcaaaaccagaaatgacaatgctcccttgggcttaggtcttggccttggacggaacaccagatctgttacaccctcatcatga

SEQ ID NO: 401 - DNA, 1635 bp, Glycine Max
atgtcgtcttcggagtcccaagaccccgccgccgccgcagcatcgtcggaggcccaagtcagcaaaaaggccgccaagaaggaggccgccaagctggagaagctccgccgacgccaggaaatcgccgccgcgtccgccgccacggccaacctctccgtcgacgaggaggaccccctcggcgggaactacggcgacgtgccgctggtggagctgcagtccaagacgccgtcggacgttggcgagtggacgcgcgtggaggcgctcggcggcgcgctggagaacaattcggtgttgatccgagggagggcgcaggcgattcgccccgtcgggaagaagatggcgtttctggtcatcagagagaacggtttcaccgttcaatgcttggtgcaagcgcagcctgatacggtgagtgcgcagatggtgaagtttgccgctgcactcagccgcgagtccatcgtcgatgtcgaaggcgttgtttcggtccccaccgctcccatcaaaggcgccacgcagcaggttgaaatccaagtgaggaagttgtattgtgtcagtagggctgtacctactctgccaattaatcttgaggatgctgctcgaagtgaagttgaaattgagaaggctcttcaggctggtgagcaacttgttcgcgttaatcaggatacacgtttgaactttagggtgcttgatgtgcgaacgccggctaatcaagggattttccgcattcagtctcaagttggaaatgcatttagacaattcttagtatctcaaggcttttgtgaaatccacactccaaagttgattgccggatctagtgagggtggagctgctgtttttagactggactacaaaggtcaacctgcatgcctggcccagtcacctcagcttcacaagcaaatgtctatctgtggagattttggccgtgtttttgagattggtcctgtgtttagagcagaagactcctacactcacaggcatctgtgtgagtttacgggccttgacgttgaaatggagatcaagaagcattactttgaggttatggatttagtcgatagattgtttgttgcaatgtttgacagtttgaaccagaattgtaagaaggatctggaagctgtggggtctcagtacccatttgaacctttaaagtatctgcggaagacactacggcttacatatgaagaagggattcagatgctcaaggatgttggagtagaaattgaaccttatggtgacttgaatactgaagcggaaaggaaattgggtcagctagtcttggagaaatatggcacggagttctatatccttcatcggtaccctttggctataaggccattttatacaatgccttgctatgacaatccagcatacagcaactcgtttgatgtctttattcgaggtgaggagatcatttcaggagctcagcgtgttcatgtgccagaatttttggaacaacgtgcagcagcttgcggcattgatgtcaaaacaatatcttcgtacattgattctttcagatatggtgcaccaccacatggtggctttggagtagggttggagcgtgtagtgatgctcttctgtggcctgaataacattcgcaaaacatcactctttcctcgtgacccacttaggattgcgccatga

SEQ ID NO: 402 - DNA, 480 bp, Glycine Max
atgtcgttgattccaagtttcttcggcaccgggcgaagaaccaacgtcttcgaccccttctccctcgacgtgtgggacccattccatggcttccccggcaccaccgccctctccgctccgcgctccgagacggcggccttcgccaacacgcgtatcgactggaaggagacggcggaggcgcacgtgttcaaggcagacctgccggggctgaagaaggaagaggtgaaggtggagatcgaggaggagggaagggtgctgcagataagcggacagagaacaaaggagaaggaggacaagaacgacacgtggcaccgcctcgaacgctccagcggcagctttctccgccgcttccgcctgccggagaacgcgaaactcgatcaggtgaaggccggcatggagaacggagtgctcactgtcactgttcccaaggtggatgtcaagaagcccgatgtcaagcccgttcagatcactgaaggctaa

SEQ ID NO: 403 - DNA, 780 bp, Glycine Max
atgtctctgttcttactgcgatttttacacttttccaattatattaaagggtctaccacagcgaaatctgtggcattccaagttcgagctgagaaatttgcaaataggaagaggaaaaatcagtataggggaatccgtcaacgcccttggggaaaatgggcagctgagattcgggatcctagaaagggggttcgtgtctggcttggaaccttcaacactgctgaagaagctgcaagagcttatgatgctgaagcacggaggattcgtggcaagaaagccaaggtgaattttcctgaggaggcaccaggtacttctgtaaaacgttccaaggtaaatccacaggaaaatctgagtcacaagttcggtgctggcaacaatcacatggatctggtggaacagaaacccctagttaatcagtatgctaacatggcttccttccctggaagtggaaatgggctcacatcccttccgtcatctgatgatgtcaccctttacttcagttcagatcaggggagtaattcatttgggtggagtgaacagggccccaaaactcctgagatctcatccatgctttctgctcctttggattgtgaatctcattttgtgcaaaatgccaaccagcagcctaactctcagaatgtgatggcttatcttgaagggagctggggcgatacttcgttggaatccttgctatctggtgacacaactcaggatggtggaaacctcatgaacctttggagctttgatgacattccttccatgtctagcggagttttctga

SEQ ID NO: 404 - DNA, 4140 bp, Glycine Max
atgtcttctgcggcagcttcaacttggatcacgtccttctcgtgttcacccaatgcaactccaaatttacctcactggctgagattcattttcctctctccgtgtcctcagagggctcttttgtctggtgttgacattcttctcctgttgactctctttgtgtttgcgctaataaagctctattctaggttcacttccattggcaaccacaactcagagctcgacaagccccttatcagaaacaacagagtttctaaccgaacaacagcatggtttaagttaactctaaccacaaccgctgtttggactattttgtacacggttgcttgcattctggtgtttaccagttccaccgatgggacgtggaagcaaactgatgggttcttttggttacttcaggctataacacaactagtccttgcagttttaatcatccatgagaaaaagtttcaagctgttgttcaccctttgtcgcttagaatatactggattgcaaatttcatcttggtttctttgttcacagcttctggggtcatacgtttggtctctgtgggagtggaagatgggaaacacttcagcttcctggttgatgacacggtttctttcatttctctacctttgtctctttttctgctttgcgttgctgttaaaggttccaccgggattgtgtccggggaagaaacacaacctcttattgatgaggaaacaaaactatatgacaaatccaacgttactggctttgcttcagcttctgcaatatccaaggccttttggatttggataaacccgttgctgagtaaagggtacaagtcaccgttgaagattgatgaaattccatacctttcacctcagcatagagctgagaggatgtcggtaatctttgaatcgaagtggcctaaatcagacgagaggtcaaagcacccagttcgaaccacgttgcttcggtgtttctggagggagatagccttcactgccttcctggctgttattaggctatctgtaatgtttgtagggccagttctaattcaaagttttgttgatttcacggcagggaaaggtagctctgtgtatgaagggtactacctcgtgttgattctcctgtgtgctaaattcgtagaagttttgacaactcaccatttcaacttcaactctcagaagcttgggatgcttatcagatgcaccctcatcacttctttgtacaagaaggggctgaggctaaccggttccgcgagacaggatcatggagttgggcctattgtcaattacatggctgtcgatagccagcaactctctgatatgatgcttcagttgcacgccgtgtggatgatgccatttcaagttggtattggtttgttcttgctgtacaactgtctaggagcctcagtgattacggctttacttggacttcttgctgttattgtatttgctgtggtgtctacaagaaagaacaagcgttaccagtttaatgccatgatgagccgtgattcaaggatgaaggcagtgaatgagatgctcaattacatgcgtgtcatcaagttccaagcatgggaggagcatttcaatgggaggattttgggtttccgaaagtccgagttccagtggctttccaagttcatgtactcaatctgtggcgttattattgtgttgtggagcacgccattgttgatatcaactctcacgtttggtactgcgcttttgcttggagttcgactcgatgcagggacggttttcaccaccacaactgtgtttaagatcctgcaggaacctattaggaccttccctcagagtatgatatctctttcacaagcgctggtgtcacttgggaggttggataggtacatgtctagcagggaattgatggatgattcggttgagagagaagaagggtgtggtggacacactgctgtggaggtcaaggatggaaccttcagctgggatgatgatggccaacttaaagacttgaaaaatattaacttgaagattaataagggggagcttacagcaattgttgggactgtaggctcagggaagtcttctctccttgcttcaattcttggcgagatgcacaaaatttctgggaaggttcaagtttgtgggagtactgcttatgttgcacaaacatcttggattcaaaatgggaccatcgaagagaacattatctttggtttaccaatgaacagacagaagtacaatgaagttgttagagtttgtagcttggagaaggacttggaaatgatggaacatggggaccagacagagattggagagcgcggaatcaacctaagtgggggtcagaagcagcgcatacagcttgccagggctgtgtatcaagactctgatatatatcttcttgatgatgtttttagtgctgttgatgcacacactggcactgaaatattcaaggaatgcgtgaggggggctctgaaaggcaagaccgttattcttgttacacaccaagtagacttcctacataatgtggatcttatagtggtgatgagggacggaatgatagtccaatcggggaagtacgatgatctacttgcgtctggaatggattttagtgctcttgttgcagcacatgacacctctatggaactagtggagcaaggtgcagtcatgactggggaaaatttgaacaagccattgaaatcaccaaaggcagcttcgaataacagagaagccaatggtgaaagcaactctcttgaccagcccaagtctggcaaggaaggttctaaactcatcaaagaggaggagagagagactggaaaagttagcttacatatctataaactctactgcactgaggcttttgggtggtggggcattatagcagtaatctctctttctgtgttgtggcaagcatcaatgatggcaagtgattattggctggcatatgaaacatcagaagagcgtgctcagttgttcaatccttccatgtttatttccatctacgcgattattgcggtagtttcagttgttttaattgtgctaagatcctactctgtcacagtcctggggttaaagacagcacagattttcttctctcaaattctccacagcatcttgcatgcccccatgtctttctttgacaccacgccatctgggagaattctaagcagggcatccactgatcaaaccaatgttgatgtctttatccccttgttcatcaattttgtggtggctatgtacattacagtgatcagcatcttcataatcacgtgtcaaaattcttggccaacagctttcttgttaattcctcttgcttggttaaacatttggtaccggggttattttcttgcttcatctcgcgagttaactcgtctggattcaattacaaaagcaccagtgattcaccatttctctgaaagcatttccggggtcatgacaattcgcgcattcagaaagcagaaggaattttgcggagaaaacattaaacgggtgaatgctaatttgagaatggatttccacaacttcagttccaatgcgtggttgggtttccgcttagaattgcttggaagcttagttttttgcctttctgcaatgttcatgatcatgttacccagcagtatcataaagccagaaaatgttggtttgtctctctcatatggcttgtcattaaatgccgtgatgttctgggctatatacatgagctgtttcattgaaaacaaaatggtatctgttgagaggatcaaacagttcacaaatattccatcggaagcttcatggaacattaaggatcgcctgcctcctgcaaattggcccggggaaggccatgttgatatcaaagacttgcaggtcagatatcgtccaaacactcctttggttcttaaaggcatcaccctaagcatcaacggaggggaaaagattggagttgttggtcgaacaggaagtggaaaatcaactttaattcaagttttcttcaggctggtggaacctacaggaggaaaaataatcattgacggcattgacatatccgccttggggcttcatgatcttaggtcacggtttggtatcatccctcaggagcctgtcctttttgaaggaaccgtcagaagtaacattgatccaactggacagtacacagatgaagagatatggaagtttggaacgttgtcaactaaaagatgcagtggcttctaa

SEQ ID NO: 405 - DNA, 1269 bp, Glycine Max
atgtggaagtggttgttctctcgggagccagcgccgccgccgccgccggtggttctggtaccgccgctcttcgacttccctcccctcgccgcgcgcaaccgcatgctccattcctcctacgacgtcgttttcggcaagctcgccctcacttcgctcttcgaggactacttccaccaggccaggaacttcaccaccagaatcatgctcaagccgatcgaggatcctcacgtcgatctcattgcaaccgtttcgggtcctcttgatcacaagccaaaagacagtattgccggagatgcattgtttcgctggcaaagtgatgttaatgatcctcatacgtttatggacctttatgtatccacgtctaatccgattttgcagatgagatcgtgcgcttactatcccaaatatggatttggggcttttggagtgtttcctctgctgttgaagaaaagagaatcctcccaagattatggcttgatggggttgagatatggttctggaaatctatcctttggagtcacacttttgccttttgccatgaaagatgaattaccaaaaagtgcatggctggtaagcaagatgggaaggttgactgctggggtgcagtatgagccacaacaaggaaatgcaaaactttcaaatttgatgaactggagttgtgccatgggctatggtgttggatcaggcagccccttgtgtccatccttcaatttcaaccttgagcttgtcaaaagctctcagtttattgcctcgttctatcaacatatggttgttcaaagacggaacccccttgaagagaattccgttgttggaattacaaactacattgattttgggtttgagttacaaacatgtgttgatgacgccatagcagaaaacaatatgttagaccccacctttcgaataggggcatcctggcaggctaataaaaacttcttgctgaaggcaaaggttggacctcgtagctcatcaatggcattagcattcaagtcatggtggaaaccttctttcactttcagcatttcagccactagagatcgtgctgatggtaaaatgcaatacggatttggcatccaaagtgagagtctcagggaagccagttatcaaagagctgatcccaattatgtaatgctcacgcaaagcaaggaacacttagcaaagggcattgtctggaaagcagggaagcgacctatgctaaaatccgacatagatgcgggacattttgatggtctacctagagaattacaaccacttgataaaattttgtaa

SEQ ID NO: 406 - DNA, 2658 bp, Glycine Max
atgtggaatccgctttcatgggtcatggaggctgcagctataatggccattgctcttgcaaacggcgaagggaagcctccggattggcaagattttgtaggtattgtttgcttgttgctgatcaactccactatcagtttcattgaagaaaacaatgctggaaatgctgctgctgctcttatggccggtcttgctcctaagacgaaggttcttagagatggtaaatggagtgagcaggaagctgcaattctagtccctggagacatcataagcatcaagctaggtgacattattcctgctgatgctcggcttcttgagggtgatccactgatggttgatcaagcagctctgactggagaatcacttcctgtgaccaagcacccagggcaagaagttttctctggctcaacttgcaaacaaggagaaatcgaagccgttgtgattgcgactggtgtgcacacattctttggaaaggcagcacacttggttgatagcaccaaccaagttggacatttccagaaggttcttacagcaattgggaacttctgtatttgctccattgcggttggtatgctagctgagattatagtgatgtacccgattcagcaccgcaagtacagggatggaattgacaacctgttggtgctcttgattggagggattcccattgctatgcctaccgtgttgtctgtgacaatggccattggttctcacaagctctcacagcagggcgccatcacaaagagaatgactgccattgaagaaatggcaggcatggatgtcctttgcagtgacaagacaggaacactcaccctcaacaaactcactgttgacaagaacttggttgaggtctttgcaaagggtgtggacaaggatcatgtgatccttcttgctgccagggctgccaggactgaaaaccaagatgccattgatgccgccattgtgggaatgcttgctgatcctaaagaggcaagggctgggataagagaggtgcattttctaccattcaatcctgttgacaagagaactgctttgacttacattgatgctaatggaaattggcacagggcaagcaaaggtgctcctgagcagatcatggccctgtgcaacctcagggatgatgctaagaagaaggttcatgctattattgacaagtttgccgaaagagggcttcgttcacttgctgttgctagacaggaagttcctgagaaaacaaaagaaagtgctggtgctccatggcagtttgttggtttgttgtcactgtttgatcccccaaggcatgacagtgctgaaaccattcgccgagctcttaaccttggtgtaaatgttaagatgattacaggtgatcaacttgccatagctaaggaaacaggaaggagacttggaatgggaacaaatatgtatccatctgctacattgcttggtcaagacaaagatgcaagtattgccgcacttcccgttgaagagctgattgagaaggctgatggatttgctggagtttttccagagcacaagtatgaaattgtaaagaagttgcaagagaggaagcacatttgtggaatgactggagatggtgtcaacgacgctcctgcattgaagaaggctgatattggaattgctgttgctgatgctactgatgctgccagaagtgcttctgacattgtcttgacagaacctggattgagtgttattataagtgctgtcttaactagcagagctattttccaaagaatgaagaactacacgatctatgcagtatctatcacaatccgtatagtgtttggcttcatgtttattgcactgatctggaaatttgacttctcacccttcatggttttgattattgccattctgaatgatggaacaatcatgacaatttcaaaggacagggtcaagccatctccattgcctgatagctggaaactgaacgaaatatttgctactggggttgtgcttggaggttacttggcactgatgactgttattttcttctgggcaatgaaagagacaacgttcttccccgacaaatttggagttagaccaattcatgacaatccagatgaaatgactgctgctttgtatctacaagtcagtatagtcagccaggctttgatatttgtcacccgttcgcgcagctggtccttcattgaacgccccggactgctattaatgactgctttcattattgctcagctgattgctacagtaatagcagtgtatgccaactggggttttgcaaggatccaaggaattggttggggttgggcaggagtgatttggctctacagtattgtcttctatttcccacttgacctcatgaagttcgccatccgctacatcttgagtggcaaggcttggaacaatctccttgaaaacaagactgccttcaccaccaagaaagactatggtaaagaggagagggaagctcaatgggctcttgctcagaggaccctgcatggacttcaaccaccagaaacttctaacatcttcaatgaaaagagcagttatagagaactgactgagattgctgagcaggccaagagaagagctgaagttgcaaggcttcgcgagcttcacacacttaagggacatgttgagtctgtggtgaagctgaagggtctggacattgacacaatccagcagcattacactgtgtaa

SEQ ID NO: 407 - DNA, 2667 bp, Glycine Max
atgtggaatcctctttcatgggtcatggaagctgcagcaatcatggccattgctttggccaatggaggaggaaaacctcctgattggcaagactttgttgggattatcacactccttattatcaattcaacaataagtttcattgaggagaacaatgctggtaatgctgcggcagctctgatggctcgtttagcacctaaagctaagttccttcgagatgggaaatggattgaggaggatgctagcattcttgttcctggtgatataattagtgttaagctaggggatattatccctgcggatgctcgtctacttgaaggtgatccactgaagattgatcagtctgcacttacaggcgagtctcttcctgtcacaaaaggccctggtgatagtgtttattcaggctccacatgcaagcagggagagatcaatgcagttgttattgccacaggagttcataccttctttggcaaagctgctcatcttgtggactccacaaatcaagttggtcatttccagaaggtcctgactgcaattgggaacttctgcatatgttccattgctgtgggaatgatagtagagataattgtcatgtacccaattcaacaccgggaatatcgtcctgggattgacaatctgcttgtgcttcttattggaggaattcctattgccatgcctactgttttgtcagtgacaatggcaattggatcccatcgcttagctcagcagggtgctattactaaaagaatgacagcaatagaagagatggcaggaatggatgtattatgtagtgacaaaactggaactttgactttgaataaactgacagttgacaagaatcttattgagatttttgctaaaggagttgacgtagatactgttgttctcatggccgctcgggctgcacgattggaaaaccaagatgctatagatgccgctattgtagggatgttgggtgatccaaaagaggcaagggctggtattcaagaggttcacttcctacccttcaatccaactgacaagcgaactgcaatcacttatatagacggtgaaagtaaaatgcatcgtgtcagcaaaggagcaccagagcagattttgaatcttgcacgcaataaatcagagatagaacgcagagttcattctgtcattgataagtttgcagagcgaggattacggtctcttgcagtagcttaccaggaagttcctgatggaaagaaagaaagccaaggtgggccttggcaatttattggactcttgcctctatttgacccacctagacatgatagcgctgagacaatacgaagggcattaaatcttggagtaaatgttaaaatgataacaggtgatcaactagcaataggaaaagaaacaggacgccgtctggggatgggaaccaacatgtacccttcatcggctttattgggccaaaacaaggatgaagcaattgctaccttgccagttgatgagttgattgaaaaagcagatggatttgctggtgtttttcctgaacacaaatatgagatcgtgaaacgtttacaagctaggaaacacatatgtggaatgactggtgatggggttaacgatgctcctgctcttaaaaaggcagatattggaatagctgtcgccgatgctactgatgcagctcgtagtgcttctgatattgttctgactgaacctggtctcagtgttatcatcagtgctgtactgaccagtcgagcaatattccaaaggatgaagaattacacaatctatgcagtttccatcacaatccgtattgtgcttggtttcatgttactggccctcatatggcattttgattttccaccattcatggtgctgattattgctattcttaatgacggtaccattatgacgatatcaaaggacagggtgaaaccatctccatatccagatagctggaagttggccgagatctttaccactggaataattcttggtggttatttggctatgatgacagttattttcttttgggcagcatataaaacagattttttccctcaaacatttggagtctcaagtcttcagaaaaaggatagggatgactttagaaagcttgcctcagcaatatacctacaagttagcacaattagtcaggccctcatattcattacacgggctcggagttggtcttatgttgaacgtccgggtttgttacttgttgcagcttttgttatcgcccagctgatagctaccttaattgcagtttatgcaaattggagtttcgctgctattgaagggattggatggggttgggctggtgttgtttggctttacaacctcatcttttatatcccacttgactttatcaagttcataattcgatatgccttgagtggaagggcttgggatcttgttattgaacaaaggattgcttttacaaggaaaaaagattttggaaaggaagaacgtgaacttaaatgggcacatgcacagaggacgcttcacggccttcacccaccagagactaagatgttcaatgaacgtacaagttacacagaacttaatcagatggctgaagaggctagaagacgagcagaaattgcaaggctgagagaactgcatacacttaagggtcgtgttgagtctgtggttagactgaagggtcttaacattgacacaatacagcaagcatacactgtctag

SEQ ID NO: 408 - DNA, 705 bp, Glycine Max
atgttccgcagaatcttgtcccatcatcgcgcactctcagcctgcgcccacaatgcaacaacgcgctcactcgttactcgccgcacccccaatgttccaccaccacccaccttcctaatcacaggatcaaggcccgtttcttccaaaacatcccaatccaacgaaaccggtgaaaccaccaataaggctaaaaaggatgtggcaaacgtcgaggatccctttagtgcccctacttataacattcccgagaagcctgtcacgttcgtggaaggggcttcctacggtgttgtcattcttgcggggctcggaatcgcagctgctgcaggatatgctgttttcaaagagcttatttttcaacctaaagagtacaagatctataacaaggctctcaaaagaattcaggatgatggtcagatacgagtaaggattggatttccaattactggttatggtcaggagagtagaaatcgagctgctcgccaaagaattcctcacagggtatggactgatgaggaaggtgtcgagcatgtggaggttaatttttatatccggggcccccatggacatggaaaagtatttgcggaaatgttcaaaggcgctgacaatgagtggaagtttacttacttgattgttgagattagagcaccatctaccgcacaaataattctggagtcatacatcccatcttacagtgcaaccaagtag

SEQ ID NO: 409 - DNA, 843 bp, Glycine Max
atgttccgcataaacaacaccctggtcggaatcctccacacactccccttactcctaagtatcgccgccatgggcgactccgcctacatccgcgtccacggcgactgccagaaggtgctccagtacccgctcctcttcggcggcctcttcatattcgtcatctccaccctcggcctcgtcggcgtgctgtgccgcgtcaacgccgccctctacctctacctcctcgcaacgttcttcgtcatcctcgccttctcgtcgttcaccattgtagcgctcttcgtcaccagaaacaacgcgccggatcgggcggggccgtcggtggggtatggagtaggggatttctcgccctggctgcagcactacgtcaccgaccagcgaaactgggacgtggcccagagttgcttggtgcagaagcgcgtgtgtcacggcctcgccgtggacgctaacaataatgactctctcgctttcaaacggttaactaccacgcagattgggtgctgtaagccaccgttgcgatgtggattcacaaagaagaacgctacgttctgggaagcgccaaaagcgggtccattagcgaatgacactgattgcaggacatggagcaacagacaagacaaactgtgtttcaactgcgattcgtgcaaaggaggagtgctggccaacatcagaagccagtggagacatctcaccatattcaatacatgcgtgctcgtgctcgtcaccaccatctatgtcttgggctgctacgccatcaggaacaatcgccatacatgcgctttctcatttgtgtgcatgttactatatactatactattactagcgaagacgtctctaatgcagtag

SEQ ID NO: 410 - DNA, 1125 bp, Glycine Max
atgttgaagctttcgtgcaatggcttggaccgggctcactccctggcccaatgcggcttcgcgggccggcccgcctgcgccgtccctcgccggaggaggagcggcgtctccggattccggttgccggaaggcaggtcgatccgggtgtccgcggcggtgtcggcaaaggacggcgcggtggcgacccgggtagaggcggatcccggtacgctggcggaccggctgagggtggggagcttgacggaggatgggttgtcttataaggagaagttcattgtgaggagctacgaagttgggatcaataagactgccactgttgaaaccattgccaatctcttgcaggaggttggatgtaatcatgctcagagtgttggatattctactgatggttttgcaaccacccctacgatgagaaaattgcgtctcatatgggttactgctcgcatgcacattgaaatctacaaataccctgcttggagtgacattgttgagatagagacatggtgccaaggggaaggaagggttgggacaaggcgtgattttatactgaaagactatgcaactgatgaagttattggaagggcaacaagcaaatgggtaatgatgaatcaggacaccagacgactccagaaggtttctgatgatgttaaagaagagtatttggttttctgtcctcgagagcccaggttagctattccagaggcagatagtaatagcttgaagaaaataccaaaattggaagaccctgctcagtattccagacttggacttgtgccaagaagagcggatctggacatgaatcagcatgttaacaatgtcacctatattggatgggtgcttgagagcatgcctcaagaaatcattgatagccatgagttgcagagtattaccttggattacagacgagagtgcggacaacatgacatagtcgattccctcactagtgtggaagcgatacagggtggtgccgaggcagttccagaactgaaaggtacaaatggatctgccacggcaagggaagacaaacatgaacaccagcagtttctgcatctacttaggttgtctactgaaggacttgagataaaccggggacgaacagaatggagaaagaaagctccaagatga

SEQ ID NO: 411 - DNA, 792 bp, Glycine Max
atgttggcactcacagtatccattatcctcatcatcacactctcttcttcgccattagtcacctctcactactcctctccttctctagaagcctcgccgaccttctccgaatggcgatccgcgcgcgccacctactacgccccggcggatccccgcgacgtggtgggcggcgcgtgcggctacggcgacctggtcaagggcggctatggcatggccactgtgggcctcagcgaggcgctgttcgagcgcggccagatctgcggcgcgtgcttcgaactccgctgcgtcgaggacatgcgctggtgcatccctggcacctccatcatcgtcaccgccaccaacttctgtgcccccaactacggcttcacctccgacggcggcggacactgcaaccctcccaacaaacacttcgttctccccatcgaagcttttgagaagatcgccatttggaaagccggcaacatgcccgtgcagtatcgcaggataaagtgtaggaaggaaggagggatgcgatttacggttactggttctggaatcttcatctccgtgctgatcagcaatgttgctggccatggagacgtagtggaggtgaaggttaaaggctcgagaactggttggctttcaatgggtcggaattggggacaaaactggcatgtaaatgcgttgctgcaaaatcaacccctttcgtttgaggttaaagccagtgatggaaaaacggttacgtcttacaatgttgctcccaaggattggacctttggacaaaccttcgaaggcaagcaatttgagacttga

SEQ ID NO: 412 - DNA, 591 bp, Glycine Max
atgtttagcccttcgcatctcaaaaccttgtaccctcttcaacaagccttctcagtaaaaccatcttcaaccataagctccatgaagctaaagagaatcgtgcacaccctcatagtttcccacttgtgccgaatcattcgtgcactctccaaagtcaaagatgttatggttgagattcttaaagaaaactcaaccatgatccacaaaaagcactacaacaactacagacgcaagaataagatcatcctaggctccttcaggctccactacaactggtgctcctccaaatcctcgcatgtgttgccggttcccgaaccggtttacgccacgtgccgcgactcgggggagccgccgcgagacgaagaagattgcccctacctaaggtggcttgaggagaaggttgaagttgaaggtggtggtggtgataatagtaataataagggtgcaagtgcaacaaatgatgagcatgatgaaatgaacgagattgatgtgctggcggaaatgttcattgccaattgccacgagaagttcaggttggaaaagcaagagtctgataggaggttccatgaaatgctggctagaagcatgtga

SEQ ID NO: 413 - DNA, 2874 bp, Glycine Max
atgtttatgtggatcgaggaagttgaagtttcacggctgtgggtttggctgttgagggccagtcgttgtcccggggccctgttatttcttgttagcgtgtccatgtatgaaactgggtttgtttggcgtgctttagggaatgtcgcgtacccctttaaatctgacgaatccatacctccttccaatgtagtttctacgattgggtatgaagatttccctgacatcaccccacttcttgaagtgatgccagagttcattctctgtaatgtcttcaccaaaacgagtgaagtaaaaggatgtgatatccttgtggtccatccatcccgtcggggtgcctccctgatgctcgctctgtctctcttggctacctcacctctaaacctatccctcccccacccagtgtatcaggatgattggctcaagacatcagcaaactctttgcagcactgggagaaggctcctctagagccctatgctctacagaaacctattacgtatcatgttgtatgtcccgacattgatccccttacttctgctgctgctgatttttttcaacaactaggaacagtgtatgagacatgcaagctaggtactcattcacctcaaggcttggggaatcagatagagatagagtctgcaaagttgtcatcttgtggttttgttttacttgattgcccccaatcaatgaagattgagagcagcaatgcatctcttgttggttcagtaagtgattattttttatctttatctaatggttgggacctgactagttatctcaagtctctttcaaaggcacttagaggtttgaaaattggctcttgcttttctacaaaccccagcgaaggaagtaacagctcatgcttggtaatctatgtggtgtgcccatttcctgatcccactgcaattttgcaaactgtaattgagtcttctgttgccattggatcggttgtccaacagtcggatagagagaggagatctagcttgcatagtcaggttgtgaaggcattaagtggcttggccactgtcgatgaagcttcagcgtctaatatccttgtgctttctgggtttagtattccaaaattggtcttgcagatagttacagtggatgccattttcagagtcacaagcccatctgttagtgagcttgtcattttaaaagagacttcctttactgtatacagcaaggctcgtcgcatttcacgtggaatctctagtgattttgctcaatctgcattttctagtagatctcattctggtttgacacaaatgccttctcccatctctgggatgtggaaagactgtgttggtcctcgaatggcaggacattctcttccaagagagggtgacattgatgctagcttgaggcctggtacttgggataattcttggcaaccaacaaggactggggggttaagctgtgatccaagtagaactggggataattttcttcatgatgaaattcgttacatgtttgaacccctttttattctcgcagaaccaggttctcttgaaaatggtatttcagttattggtagtcccacttcagaatcttccaaggcattggcagatgacagtagtggtaactatgtacagagtacaagtacagcaggaagtgtggagtctgcttcaagcactgatgcatctgggtccgatccaaagactcctccaagcctacattgttgctatggatggactgaggactggcgttggctcgtgtgcatctggacagactcaaggggagaattgctggactgcaatattttcccctttggtggaataagcagcaggcaggatacaaagggtctgcagtgcctatttgttcaaattcttcaacaaggttgtctgatacttcaatcttgtgatcctggccttgcaaagcctcgagattttgtgatagcacgcattggaggtttttatgagctcgagtaccttgagtggcagaaagccatttattcagttggtgtatctgagatgaagagatggcctctgcaattgcggaaatctatgtctgatgggatgtctgcaactagtaatggttcttctttgcaacaatcagatatgagtttgatcccagaaagaactcttccttcctcaccgagtcctttgtacagccctcataccaaatcccctggttttatgaaaggcagtttagggcaacctactgcaagaaagcaacttatcggtggacattctatggttgacaattctaggggtttgcttcattgggcgcaaagcattagttttgttgcagtttccatggaccatactttacaactagttctcccagcagattcatcaactcctggttacatagaaggtttcactccagttaagtctcttggttctacgtcttctgcatatattctaattccttctcctagcatgcggttccttcctacaacagttcttcaactcccaacatgcctcacagcagagtcgccaccactagctcatctgcttcacagcaagggttctgctcttcctctctctactggatttgtggtttcaaaagctgtaccttccatgaggaaggactatagagccaaccaaaaagaagaatggccctctgtactttcagtgagcctcattgattattatggaggtactaacatcccccaagagaagattgtccgaggaattaacaagcaaggtggtagaagtttaagctgggaagctaaagattttgaaattgagacccacttggttctggagtctcttgcagcagagcttcatgccttgtcatggatgacagtgagccccacatacttagagcggcgaacagcacttcctttccactgtgacatggttctaagactaagaagacttcttcactttgctgataaagagctctccaagcagtccgagaaatcttga

SEQ ID NO: 414 - DNA, 624 bp, Glycine Max
atgttttccatcaatcatttctccgacccagatgccacctcgccggggtcgggaggaagctcccgaccggcgctgtcggacgaggatttttttctggcggcaagcaatcccaagaaacgcgccgggaggaagaagttccgggagacgcgccacccggtgtaccgcggcgtgagaaggcgggactccggcaagtgggtgtgcgaggtgcgcgagcccaacaagaagtccaggatttggctcgggacctttcccacggcggagatggcggcgcgtgcgcatgacgtggcggcgatcgcgctgaggggaaggtcagcctgcctcaacttcgccgactccgcgtctcggctcccggtgccggcgacggcggaggccagggacattcagaaggctgcggcggaggccgcagaggcgtttcgccctgggaaggatgatgatgcggtggcggagagggtggcagcgacggcgacggagcgtgaagaagaacaagaagaagggatggtgccggagtatctgaggaacatggtgctcatgtcgccgacgcattgcttcgggagtgatgagtatggaagtgctgacgtggaatttgacgatgctgaagtttctctgtggagttactccatttaa

SEQ ID NO: 415 - DNA, 882 bp, Glycine Max
caatcttcttcgatatactccctcacccttgacgagttccagcacacgctatgggagagtggcaagaacttcgggtccatgaacatggacgagttcctcagcagcatatggagtgcagaagagaatcaagttttgaacaattccgtctctaacaacaacaacaacatgaacaacttgtctttagaagctttgacagagaaaggggtgataaggaagcaaccaagccttcctcggcaaggttctctaacacttcctgcacccttgtgtaggaaaacagtggacgaggtttgtaataataataatgtgcagaataccgaatctgcccctcgccaacctacctttggagagatgactttggaggatttcttggttaaagctggggtagttagggaacaaggtggaatggctgcaatgcctgccatgcctgctcaagcttcagcacatcaacatatgcagcagtatggcatgtatgcaaataacaaccctacaatgggggcttcttttgtcggtaggccggtaatggggatggcgggtggcgtcgatgtcggtggcggtggtggtgggaatgtggttgcaccgccttaccaggctgtgcctcagggtggtgttggtggtgcaattggggattcttctggggtgttgaatggtggcggtggctatgcggcagtgagtaacatgggaatggtggcgccagtgagcccggtttcaccggaggggattggaaccggcgaaaactctggtggtcagttcgggatggacattagtgtattgagagggagaaagagggtgttggatggtcctgtggagaaggtggtagagagaaggcagaggaggatgatcaagaacagagaatcagcagccagatctagagcaagaaaacag

SEQ ID NO: 416 - DNA, 1293 bp, Glycine Max
caattttggtttaacacgaacacacccattgcattaaaaaaaaaaaaaagcatacatacctgggttcaatacccaatcaaaacacgtgttgtaaacccccctttgcctaactctattgccaagcaattttccattatatattcactcttaaaccctaaaccttggcttgcggcgtgggaggttgcaaaaatggaggaagcaagagttctgaagaatttcccgcaaacccctgaatccaagtactggtcctccttcaagacccaacaaattcccaatctcatctccgttccttccatcacgttctctccgacaccccctcactctttcgccgccgcacattccgcctccctcactctcttcagctcccaaacgctctcccccgccgccaccatctcctccttctccgacgccgtcacctgcgcctccttccgctccgacgcccgcctcctcgccgcctccgacctctccggcctcgtccaggtcttcgacgtcaagtcccgcaccgccctccgccgcctcaagtcccactcccgccccgtccgcttcgtccacttcccccgcctcgacaagctccacctcatctccgccggcgacgacgccctcatcaagctatgggacgtcgccgaggcgaccccggtcgccgagttcctcggccacaaggactacgtcaggtgcggagactcctcccctgtgaattctgaaatcttcgttacaggctcctatgaccatgtcgtcaagctctgggattctagggatgttgtgttcttgccgtccggagggatggttgcgacggctggtgggaattcgcttgtgtattccatggagagtcacaacaagacggttacatcgatttgtgtcgggaaaattgggaaggatgatggagaagaatcatcgaatcagtttaggatcatgagtgttgggttggatgggtacttgaaggtgtttgattatggatcattgaaggttacacattccatgaggttccccgcgcctcttttgtcagtcgcttactcgccggattgttccaccagggcaattgggacttccaatggagtgatctatgctagcaagaagaagataagggaaaaggaaaaggagagggagagtgaggctagcttgtatttccatagagggcagggaacgaagccgtccgagggggatttcttggttatgaagcccaagaagaagaagtgggctgagcacgacatgctgttgaacaagtttgagcatggggaggctctgtattgtaccttgcctagatattctagtttgttgatgggatttgccaagaag

SEQ ID NO: 417 - DNA, 1785 bp, Glycine Max
ccaccccaccatgtcgtcttcctccgccaccaccaccaccaccctcccggtgttggcgtttctcctcctcacgaccaccgcgatcaccgccgcgccgattatcggtctagactcattcttgagccaccaatcccgaatggaccctcacgcctcgaacgactccttcctctctctcccttcctccgtcaaaaaacccctctcccactcctccgacttctccctctctctctctctcccaatctccctctccctccacctcctcggcgacttcccctccgacaccccctccctcctctccgccttcctctccgccgccagccccacccacttccactccatctctacctcctcaacctccctcccgattcctccaattctaattctaatcccaattccaaaccctatgcttacacctactcccccggcgactcttctgctgctgtaacaaagtgctccgggacgttcttcacctcctcccaccgcttcttctggatcgacctccgcgccggccccgtcgactacggtccctcgatctccggcgacggcgtcatcccccgcggcgagttccaccccctcgccgcgctccacggccgtccgaaatccaacaaggccttcgccgccgacctcgcctctctcgtctggagcgcctaccacgtcttcctcgccccctccctccggatccccgtgcccttcgagaattcactcgtgattcagttcgtccacgtgcacagcgagaacgagaaggatttggccggtttggattggaaatcgatcgagaagagcttcaggtttgagggtaagagcaatggattgcttttaggggatcagagtttgagctttaggaagtatgagattaggtattcagagtgctcgatttgctcgttcgcgatctcgcggtcgattaattcgtatacgtctaggtttctgtttgataattataccttgattgtgagtgagtatttggattcgaagcgattacaccagattttgtctgattccggcgatgagttgagaaagctggctggtgttccggaggaggactttggcagggttgttcctgtgtatgtttttgacttggattacacttcgttgttgttgcttgatcggtatcatcagtcagtggcgtttaaggatatggtgattgcggttaggacgaggaacacgcagactgtgagtgattatagttgcaatggtaggcatgtgttcatgcagacgaggcaacttgagcggccgattgttgggtcgattcttcagagtatgtggggggtgtctccaacacatttgaattggagccctcaacacaatgagactttggtggattatacgtggagtatggggcagacgccattcgggccgttttctgagatgctgagaggaatgttctggttgacgtcgttgaattacagcataacgagtgctatagatgttcttcagagtgttgagacgcatggcggggccaagagtctgctcaagcagaagcagcatgtggagtttgtgcagagatggaaccttttcaagtacaagctgaacaaggccgtgtctgcattgtcacatttggattttgacatggcgttgttttacttgaggtcctctgatcacgatctgtatgccattcactccattgtttatcacgcctcgcaggaaattgaggcgtcccttgtgtgctttagggaccctccatttccctggggttcggtctctatttctgtatcagctttccttgctgtctcttatatttatgcaagacgagacaagctttttagaaacaaaaggaagcaattttga

SEQ ID NO: 418 - DNA, 313 bp, Glycine Max
cgaattcctcttcaattggattttgcagaagaacctatatacgtgaattcaaagcagtaccatgctattctgaggcgaagacagtatcgagcaaaactcgaagcgcttaacaaacccatcaaggatcggaaaccgtatcttcacgagtcccgccatcaacatgcactgaagagagctagaggcgctggtggacgctttctcaatacaaaaaaacaattacaatcaaatcatacacctgggaatattgcagaatcaaaaatgcatcacattgaaaactatagagatggtgctgatgtctcatatgcatttaaca

SEQ ID NO: 419 - DNA, 111 bp, Glycine Max
cgcaccgccatgaatagagtctttgcctcgcaagctccttttctcgattgttgcttccaggaccaccacgccgttgccttctccgcctccgcctctgatggactcatctga

SEQ ID NO: 420 - DNA, 600 bp, Glycine Max
ctgaagggagttcaatacacttactttgaagaagatcttaggaacaagagtgctcttcttctcaaatacaaccctgttcacaagaaggtgcctgtgcttgtccacaatggaagacccttggctgagtcccttgtgatccttgaatacattgatgagacatgggagaaccaccaccccatcttgcctcaacaaccttatgatagagccttggctcgattctggtcaaggtacattgatgacaaatgcctgcctgcaatatcaaaggcagcatttactgtagacaaggaggaacgtgacaagggcactgaggaatcactcgagtctcttcaaattcttgagaatgagctcaaacacaagttctttggaggagagactatagacatagtggacatagccgctggtttcatagctttctggctccctgcaattgaagaggctgttgggttgaaattgctgaccaatgagaagtttccaaaactctacaaatggggtgaagactacaccaaccaccctattgtgaaaaagaatcttccccaaagagataggcttgtggggttcttcaaagctcgatatgcatcatccaacactgcttccaaatag

SEQ ID NO: 421 - DNA, 822 bp, Glycine Max
gaaatctctattctcaaagagctggaccacatcaacattattttaaaaacacggttttcaactacaatttcggttgtgtcatcaaggttgatcgatgtgatgaccgatgggcccgacctgtttcttgtttttgagtatcttgacaatgaattccaagctgatttcctgaaaaatccaaagatgtttatggcgtatcctagtttattttgcttcttttataagatcattttatttttcttgttcatagtgggtgacgagtttctttatcaaattctcaatacagttgcgtatctgcatgctcgtaaaattcttctcagagatttgagacctgagaatattctggttaatgtcagaacccaagttctgaagattgcactctttggggcagccagaacatttgaagctcctcttgaggcttactctagcagtgtgggttgtctttcttataggtcacctgaagtcttgtttcagtttggctgcgagaaatactcaactccaaatgatgtctgggccgtgggttgtatatttggcgagatgcttcttcaccggcctctattctctggtccaagtgatgtggagctgctggatgagatatttaccttgcttggtaccccaacagaagaaacctggcctggagtgacttctatatgcggaacctgtgctttaatgggacctccacaacagcccaaggacctggcaaaagagtttccaatgctcaatccagatggtcttgatctactctccaaaatgctttgcctttgtccaaattatagaatttcagctgaagatgctgttaagcacccatatttcaaaggagtatga

SEQ ID NO: 422 - DNA, 924 bp, Glycine Max
gaacaaggtagatgcctccatatgatgtttaagaagcaatgtaaagttggaactgaaacattcaaggcaccatcatataccaccattaagactccatttgggatgtcttcaaatgctacgaaagattccctttccaaaaatgaaatagaagcatcacaagtactggaccattgcaggtcaggacctgatcagtgtgggaagcctgattcttcgaaaactcaacatgctatagctagtgaagataatcatggacatggtagtgaaggcttcttggcatataagagctacaggccatcttcaggatcttcaaatggtaacaggaataggaagtatgcagactcagatatggggtcagattcagcaaggttcaattggtcctaccaaagaattgggagctccaattcaaccccaacaatgtgggggaacgaagtggaaaatggtaaggtgaaagggatttcaagtggagaaggaacactaggatcagtgagtggacgaactgagttagtgatgttcatggaggaggatgagcctaaggaggggattgcacaagttgagcctagtgtgcttattacttttgtttcattgcctcatggagggaatgatcttaagaggatacagttcaagcaactcgcctttttagccaatgtgagactttttcctttgttgtgttttaaattgtctcccttattctttaatctggaaaaactaagtaatgtttgtttgggagtgatctcatgcttttcaaaggttgtccagattctagattggcaggatctatcttctcataggtggtgggcagagaattatgacaaggtcatggaattgtacagtgttcaaaggttcaatcagcaactagttcctcttccaaccctacctagatctgaagacgaggtgaacatacggttttttgcaattcattgttaa

SEQ ID NO: 423 - DNA, 1314 bp, Glycine Max
gagctaagagttcaacgaggaatagcccttccaatggtggccatgaatttggcttggtttgccaagacagccatcacaacagcatttttaggccgtcttggggagcttagtttagcaggtggagctctcggcttcacttttgctaatgtcactggcttctctgtcctcaatggtctatgtggtgccatggagcccatatatgtggacaggctcatgactcttctcatgacaatctcattgttgctattggtatcacttcccatcactttcttgtggcttaatgttgacaaaatcttgatcctttttggccaacaacaagacatctccactgtggccaggacctatgtttcatgtctcatacctgacttgtttgttgcctcactcttctgtcccttaaaagcctacttgagctctcaaaccataactcttcccaccatgtttagttctgctgtggcactagccttccacataccaattaacatagtgctctcaaggactatgggcctcagaggaatttcgatggcagtttggataactgatcttattgttgttgtcttgttagccatttatgttttaattcttgagaggaaaaaggaaagcatgtggaaggaaggagggtggtgggatcagagcattgaagattggataaggctgctcaagctttgtggatcatgctgcctcaacacatgccttgagtggtggtgctatgagattctagttttgcttactggccacctcacaaatgctaagcaagcagtgggagttttggccattgtgctaaacttcgactacttgcttttctcagtgatgctgtcactagccacttgtgtttgcacacgtgtctcgaacgagcttggtgccaaccaagctggccttgcttaccgatcagcgtgtgtgtctctggcattaggttttatctctggttgcataggtagcttggtgatggttgctgcgaggggaatttgggggccactgtttagccatgatgtgggaattataaagggagtaaagaagacaatgttgctgatgggtctggtggaagtgtttaattttccgttggcagtttgtggaggcatagttagagggacagcacgaccctggttgggaatgtacgcgaatctaggtggattttatttcctggccctaccacttggtgttgtttctgccttcaagctccgtcttggtcttgttggactcttcattggacttcttactggtattgttacctgcctgacattgttattggtatttattgcgcggttaaattgggtggaagaagctgcccaggcacaaacactaacaggccaagagcag

SEQ ID NO: 424 - DNA, 489 bp, Glycine Max
gatggcctaaagaaaattttgagggactttactttaacttgtgtttgtaaccttggcttcttgtcttattttaatcaaagggaaaagcatcatgatttccttaatccttatgcatctacaaggtttgatgacttgtactacaaattgttgctagctcccctgatgcaacttggtacaggcagagagattatcactgttagtcttatatcactacactcaacttatcaggggagagtgtggaggataggaattactacacagaaaaggggcatacttgaaaactcaaacatgcagcttatgaagtgggaagattttgaagatagaggaattggacactggcgattcaactgtatcttgtcctttccttggaagcccattctttctgcaactggatacacaaaatactactttgatgcacaatctggaaaaatttcaggcatgtggagcactggaatgttcccaaaaaggcattgttcaagcaaattctaa

SEQ ID NO: 425 - DNA, 1068 bp, Glycine Max
gccaatggccgatgcagaaaacaccacacccccccaacgcgaagcgaagaagaaagccgcagctgcaatatgcgaacaacttcgccccgccaacaggaagcgcgtggctttgggagacctcaccaacgccgttgccacgtcggaaaaacactcttcttcgcagaaaaggtaaaaactcgaagaacccatagccacgcaggagaagccaaacgacccgcaattgtgtgttccctacgattccgacatttacgaataccttcgtgggatggaggtactggtactgttataagttatgaatattttatttcattaaaacctctctttcactttgttgaaatatttggtgtcggtgtcatagattatggtgctgatgtggatcctagtatgcgaccgttgccggattatgttcagaatgttcagagggaagttagtgctgacatgcgctgtgttctggtggaagttgcggaggaatacgagcatgtttcggtcaccctttacctttgtgtcgcttacgccgataggtttctgtcgttgaatgcagtatcaacaaaggggctgcaattgcttggggttgctgcgatgcttattgcttcaaaatacgaagagattaaggcacctgcagttgggaaattttgttacataatggattacacatactccaaggatgaagacattcttaaggtgtgttcctttgttgattctatgtccatatgttgcattgattttggtcgttttagttgcttttttcttggcttgttgtttcactctgtatgctttgcgcttgtttgcaggagattctctagagttggcaagagggcgatgacttctggagatctcaagtttgagtttcttagctgctactttgctgagctcactttgttggattataattgtgtgaagtttttgccatctttgatttatgttgagcatataaagacacatccttggctacatcaactcactaaatataaacccgctgacttgaaggaatgtgttcgaaacatacatgccttgtacctcaagtattgctgcaatgaaatcagcccaaaattaccaaaaaaagattaa

SEQ ID NO: 426 - DNA, 759 bp, Glycine Max
gcttatgacgatgaagaggcggcagcacatgcttacgatctagcagcattgaaatactggggtcaagataccattcttaattttccgttatcgacctaccagaatgaactgaaagaaatggagggtcaatctagggaagagtatattggatcactaaggaggaaaagcagcggtttttctcgtggagtttctaaatacagaggtgttgcaagacaccatcataacggaagatgggaggctcggattggcagggttttcggcaacaaatatctttacctcggaacttacgcaacccaagaagaagctgccacagcatatgacatggcagctattgaatatcgaggagtcaacgctgtgaccaatttcgacctcagccgctatatcaagtggcttaagcccaataataacaacaccacagtcaactctaatcttattgactctaaccctaattgtgagacgaactttacctcaaactctaatcaacaacaaggattcaattttttcaacagacaagagtcattcaataatgaagaagcggcaatgactcagcctcggccagctgttgccacgtcagccctaggacttttgcttcagtcatccaagtttaaggaaatgatggagatgacttctgctacagatttgtcaacaccgccgtcggagtctgagttgccgtcatgcacatttcccgatgacattcaaacatattttgagtgtgaagattcccatagatatggagaaggggatgatattatgttcagc

SEQ ID NO: 427 - DNA, 3667 bp, Glycine Max
gggtcaattagatccattttcatgcatgctgatagcctagattggtttttaatggttttgggtgtctttggagccatgggtgatggcttcaccacccctatctcggtgtacatcatgagcggaatcgtgaacaatgttggtggtgttttaaaaatgacaccaagtactttcatccacaacgtcaataagtattcactggcgttgacatacttggcttgtgcatccttttttgcttccttcctcgagggttattgttggacaagaacaggtgaaagacaagttgcaagaatgaaagttaagtatttaaaagcagtgctcagacaagatataacatactttgatttgcatgtcacaagcacgtccgaggttctcacatgtgtctctagtgatagtttcgtcattcaagatgttctcagtgaaaagggtccaaattttttgatgaacttctttaggttccttggaagctacatagtggcttttgctttgttttggagattggccattgtggggttcccttttgtggttcttcttgtgatccctggtttgatttacgggaaaactatgataaggttggctagaaagatcagagaagagagtaacaaggctggtacaatagcagaacaagcaatatcttccatcagaactgtttattccttcgtgggggaaagcaagaccataaatgctttctctgatgctctacaaggctctgttaagttggggctgagacaaggcttagctaaaggtttagccattggaagcaaaggtgctgtgtttgctatatggtctttcatgtgctattatggaagtagattggtcatgtaccatggtgctaaaggagggactgtattcgcagttggatcagtcatatgtattggtggatcggcattaggtgctagtttatctgagttgaagtacttcacagaagcatgcgctgctggggaacgcataatggaaattataaaaagagttcccaatattgattccgaaaatatggctggggagattctagagagggtctcaggagaagtggaatttgataatgtgaaatttgtgtatccatcaaggccagacagtgttattctgaatgatttctgcctaaagattccagcagggaacacagtggcattggttggaggaagtgggtcaggaaagtccactctgatttcacttttgcaaagattttatgacccaattgagggagagatacgtcttgatggtgtggctattaataggttgcaactcaagtggtttaggtctcaaatgggtttggttagccaagagcctactctttttgcaactagcattaaggagaatatactttttggaaaagaagatgccaatgaggaagacattgttgaggctgccaaagctgccaatgctcacgatttcatttcgcagttgccacaaggatacaatacccgggttggagagaaaggagttcaaatatcaggggggcaaaaacagaggattgctattgcacgagcaataataaaaaaaccccaaatccttcttctagatgaggcaacaagtgcactagactccgaatcagaacgcaaagtgcaagaagctcttgataaaattgttctggatcgaactaccattgtcgtagctcatcgcttatccacaataagagatgcacatgtcattattgttttggagaatgggaagatcatagagatgggttctcatggtgagctcacacaaattgacaatgggctttacacatctcttgttcatttccaacaaattgagaaatccaaaaatgacacactctttcacccttctattttaaatgaagacatgcaaaacacaagtagtgatattgtaattagtcattctatttctacaaacgcaatggctcaattttctcttgttgatgaagataatgccaaaatagccaaagatgatcaaaagctctcacctccttcattttggaaattgttagcattgaatctgcctgagtggaaacaagcatgtttggggtgtttgaatgcaacgttatttggtgcaattgagccattgtatgcatttgcaatgggctccatgatatcaatttttttcctcacagatcatgatgagattaaaaagaaagttgttatctattgtttattttttatgggattggctgtgttttcattggttgttaatatcatccaacattatagttttgcttacatgggagaatacttgagcaaaagggtgaaagaaagcatgctttccaagatactcaattttgaagttgcatggttcgatcaggacaaaaattccaccggtgtgatttgctctagattaactaaagaagccaatatagttaggtctttagtgggagatagaatggctctgttggtacaaactatttcagcagtggtgatagcatgcacaatgggcctaatcattgcatggagatttgccattatattgattgttgttcaacctattggcattgcaagtttctacacaagacttgtactcctcaagggtatgtctaaaaaggctatcaaagcccaagatgaaactagcaaaatagctattgaagctatttctaaccttcgaaccatcactgccttttcctcacaagaccaggtcataaaaatgttaaaaaaggctcaagaaggcccaatccgtgaaaatattagacaatcatggtttgcaggcattgggcttggatgtgctcgaagccttacaactttcactcgggctttagaatattggtatggtggaaagcttgttttcgatggctatattacttcaaaacaattatttcaaacatgcttaatattggcaaatacaggtagggtcatagcagatgctagtagccttactagtgacgttgcaaaaggggcagatgccattggcctagttttctcaatcttaaacagaaacacaaaaatagattctgatgaaatgactgcatacatgccccaaaagttaataggccatatagaatttcaagatgtctattttgcatacccatcaagacccaatgtgatgattttccaagaattctcaatcaaaattgatgcaggtatatccacagcagtggtaggacaaagtgggtctggcaaatcaactataatgggcttaatagagaggttttatgacccacttaaagggatagtaatgatagatggaagagacataaggtcatatcaccttaggtcactaaggaactacatttcacttgtgagccaagagccaacactttttaatgggaccataagggaaaacattgcatatggagcatttgatatgactaatgaagttgagatcattgaagcagccagaatagctaatgctcatgactttattgcaggcatgaaggacggttatgacacatggtgtggagataggggagttcaattatctggggggcaaaagcagaggattgcaatagctagggctgtgctaaaaaacccaaaagtgttgcttttggatgaggctactagtgcacttgatagtcaatcagagaaggtggttcaagatgctttggaacgagtgatggtaggaaggacgagtgtggtggtggctcataggttgagcactataaagaattgtaatcgaattgttgtgttgaacaaagggagggtggtagaagaagggacccatttgtgtttgttgtctaaaggaccaagtggagtttactactctatggtgagtcttcaaagaa

SEQ ID NO: 428 - DNA, 1047 bp, Glycine Max
ggtgatggtcctcttgttgctttcggtgcatctgatggtgtcattagagttctatcaatgatgacatggaagcttgtgcgaaggtacactggaggtcataaggggtctatctcttgcttgatgtcattcatggctgcttctggtgaggctcttctggtttcgggtgctagtgatggattgctcataatttggagaacatctaaaatttgggcacatgatggaggggttgtggcagttgagttgtcaatggtgatgggaggtgctcctcagctaatcacaattggtgtagataagacattagccatatgggacaccgtctcctttaaggatctgcggcgtataaagccaattcctaaattggcttgccacagtgtggcttcttgcccaaccctcattactccctgcccaatttcccattctttttgtttactctacctggtgtattgtatggttgcacatactttgcagccgcatcttgtagctattggaaccaacattggtgttattatctgtgagtttgatgctagatctcttccacctgttgctcctctaccaaccccatcagacagtagagagcattctgccatatttgtaattgaaagggaattaaagctattaaattttcagttaaacaactctgcaaatccatctcttggaaataacagctccttgtcagaaacaggaagacccaagggagatttttttgaaccattacttgtcaagcaggggaagaagcacataagtactcctgttccacatgattcgcatttagttctttctgtcagcagttccggaaagtatctagcaattgtttggccagatattccttatttctctgtcttcaacgttagtgattggtcaattgttgactctggaagtgcaagacttctcgcttgggatacttgtcgtgacagattttctatattggaatcagcattaccacctagaattcctatagttcccaagggtagttcatcaaaaagagcgaaagaagctgttgcggcacaagcagcagcagcagctgctgctgctgcttccacagcttcc

SEQ ID NO: 429 - DNA, 2620 bp, Glycine Max
gtctgtgtggaattggagttgaaaatggagtcaaggagctgcatgaacgtggcgtgcgccacctcgacgacgattcggtggcgcaaaggctgggccctgcgatccggcgaattcgccgatctctgcgataagtgcggttctgcttatgagcaatcaacgtattgtgatatgtttcactcaaatgattctggttggagagaatgcacatcatgtgacaagcgtctccattgtggatgcattgcttctatgtctcagcttgaattattagatactggtggtagtacacagcagcagtacacatctctggctaaccaattaactgtgaggggtatgcaagtagggcattatgcagagaatgatgggcttcggtgctggttcaaacctcataatgttgaaacagatgggccttctgcagaaatgaaaccagaaattttaccttcaacaaatttgagtatgacccttgctgctcctttaggaaattcaaatccctttcatagtgctgttgttgatgaaagggaacaaagtaaaacatctccacttttattggggtcaaggtctcgtcatcttttacctaagccccctaggtcaactattgggacaagcttagaagcaaatgctggcatggtatcccagattcgtgtggcaagaccacctgctgaaggacggggaaggaatcaattgcttccacgttattggcctaggattaccgatcaagagttgcaacaaatatcaggagagtatccagcgttttcaaattctacgattgtgccactctttgaaaagatgcttagtgcaagtgatgctggtcgaattggtcgcttggttttaccaaaagcatgtgctgaagcatatttccctccaatctctcaaccagagggccttcctttacgaatccaagatgtgaaaggaaaagaatggatgtttcagtttagattttggccaaataataacagcaggatgtatgttttagaaggtgtaaccccctgcattcagtctatgcaattgcaagctggagatactgtaacatttagccgtatggaccctgaggggaaacttataatggggtttagaaaggcaacaaattctactgcagtacaggaaacactaccatctaatatgcccaatggttctcattcaagtgaaacttcctattctggtgtttatgagaatctacctatattaagtggttactctggccttcttcagtcacaaaagggatgttcagaaacccacctaaatgcgctgtctaagaaatggaactcagctggtggtgacatgaattggcatagcattgacatgcctgaaagcagaaaaagagatgggttgccattgccacctgtgatggttcccgagaagaaaagaactcggaatattgggtcaaaaagtaagaggttgcttatcgatagccaggatgcgctggagctgaaacttacttgggaagaggctcaagatttgctccgtcctcctccaactgttaagccaagcattgtcatgattgaggatcatgtatttgaagaatatgaagaacctcctgtctttggaaagaggagtatattcgtagttcgatcaactggggtaaatgagcagtggatgcagtgtgatagttgctcaaaatggcggaagttgcctgttgatgcacttattcccccaaagtggacatgtgtggagaatttatgggatcagagcaggtgttcatgtgctgctcccaatgaattgaacccaagggaactggataatcttctgaggctgaataaaggaaaacacacacacaacacatgcagcgagagagagagagctgaaaaacacaaaagcttctttagtatcttgtttagatacttgaaacaaagactggcagcaagccagagactggccctggaacgggaatcttcaggactggatgctttggcaaatgcagcaatactgggagatgatgcaagtgactctggcagaacaccagttgttaccaccacaaaacatcctcggcatagacctgggtgctcttgcattgtctgtatccagccaccaagtgggaagggcaaacacaaacctacatgcacctgcaatgtgtgcatgacagttaaaccagagattgctcagagaaatcagttatcatggcggacgaaagatgaatcagaagtagatagcacctctcgccatttaactccagttgacggtttggagaatgaagtaagggtgcaaaatgaattagattcaaggagtccagacgatgcggtggctgaagctgccaagggacaattagacttgaattgccaacctgatcgagaagatgtgcaagctgggccgaacagcttgagcatgacgagtcttcttgaagaagcaaatctcccgctggagacctacctgaagcaaaatggccttactagcttgataacagagcagcaaacaaattcagcttcaaatgtgcaggcacagacaaccaatgatagtgaggtgaaacacaatgaggattgcggaaccgcttcgctcctccatgagaaagtggaggaacaagcgcgaagaggaagatgcagtgtgggcacaccaccagacctggtagaccatcttggagatgaaacagatggtcttgctactactgagggagagaaactcaacctaggtg

SEQ ID NO: 430 - DNA, 699 bp, Glycine Max
tacattcagcctcaacatcaagacatggttctcatctctgaagaagctaatagtagccttgagattccagttattgacatgcagaggttattatctgtggaatctgggagttcagaattggataagcttcaccctgcttgcagagaatggggattcttccagctgataaaccctggtgttagctcttccttggtggagaaagtaaagttggagattcaggatttcttcaaccttccaattatccttgtgattccaattattgacatgcagagcctgctctctgtggaatcttgtagttctaaattggccaagcttcaccttgcatgcaaacaatggggattcttccagctcttccttggtggagaaagtgaagtaggagattcaagatttcttcaaccttccgatgtcagagaagaaaaaaagttttggcagagtccacaacatatggagggttttggacaagcatttgtttcacgccaaccacgcctatttgcttgtaaacttgatggaaagtcttacctagacatcatgagaattcaaaaagtagccaacatcctgcatgtattcgtcctaaattttataagtaggacgggacgagaaaaatccgaccccatcaggaacggggatggaaaagcctgggcaattgcccagggtagccgggccttgaaaccgtccatgtccattggatttcgaggatga

SEQ ID NO: 431 - DNA, 804 bp, Glycine Max
tccaaggatgacaacttagtatttgttgcctgtgctaccggtagagttggttcacggtcagtgagggagcttataaagcttggatttagagtcagagctggagtgcaaaatgctcagagggctggtgcattagttcagagtgttgaacaattgaagcttgatggtgcaagtggaggaggggcaagcccagctgtagagaagcttgaaattctgaaatgtgatttggagaaaccagatacaattggatatgcatcaaaagtgatatgtagcattgttgccagtgagaaggggggttttcacatcactgcaccctttcaatttccaaaagattatcagatagtgagaactggatgtatggagcagcctactgatgctttcaaggaaactcataatataaccctatcaagggaagatactttatttaggggtcaggtgtcaaaccttcaggaaccagatattgcagcagtgagtgttccagatccctctgctaatgttgtggctgcggaacctagcgtcgccactcagaaagaaactgcacaacctaaaccagtggcaaatcagccactttctccctatactgtgtcatgttatgcatgcagatatcctgacttaaagcctccaacatcaccatctcctaatgcaccaactatatcagtttccacatctgctgaagaaggggtgccagagatagccacagtttcaagcaatggaccagcaccagcccaactttcaatagcagatgaaccaaaggaagaacatctccctgaacccaagtcaagaccactttcaccttataccatgtga

SEQ ID NO: 432 - DNA, 132 bp, Glycine Max
ttggataaattgatgttcatttacaattatgtggagatggctcaagtaacaggtgtcccaatttcttgtctactttccagaggccaaagcattaaagttgggtctgaacaaggaacatttgaaggtgccact

SEQ ID NO: 433 - DNA, 1851 bp, Glycine Max
aaagagcatttttgccatgtcgaaatcatcgccaatgaccagggtaacagaaccacgccctcttatgttggtttcaccgattcagagcgtttgatcggtgatgccgccaagaatcaggtcgccatgaaccccgtcaacaccgtcttcgatgctaagcgtttgattggaaggagaatttctgatgcctccgttcagagtgatatgaagctatggccatttaaggttatccctggcccagctgacaaacctatgattgtggtcaactacaagggtgaggacaaacagttcgctgctgaggaaatttcttccatggttctcatgaagatgcgtgagattgccgaggcttatctgggttccaccgtgaagaatgctgtggttactgttcctgcttacttcaatgactcccagcgtcaggccacaaaggatgccggggtcattgctggtctcaatgtcatgcgtatcatcaatgaacccactgctgctgccattgcttatggtcttgacaagaaggccaccagcgtgggtgagaagaacgtgttgatttttgacttgggtggtggtacctttgatgtctctcttctcactattgaagagggtatttttgaggtcaaggccactgcgggagatacccatcttggaggtgaagattttgataacagaatggttaaccattttgttcaggagttcaagaggaagcacaagaaggatatcagtggaaaccctagggctcttaggaggttgaggactgcctgtgaaagggcgaagaggaccctttcatctactgcacagactacaattgagattgattctctttacgagggtgttgacttctacaccacaatcacccgagccaggtttgaggagctcaacatggatctcttcaggaagtgtatggagcctgttgagaagtgtttgagggatgccaagatggacaagagcactgtccatgatgttgtccttgttggtggatccactagaattcctaaagtccagcaattgttgcaagatttcttcaatggaaaggaactttgcaagagcattaaccctgatgaggccgttgcttatggagctgctgttcaggctgctattttgagtggtgaaggtaacgagaaggtgcaggatctgttgctgttggatgttacacccctttctcttggtttagaaactgccggtggtgtcatgactgtcctcattcccaggaacactactatccccaccaagaaggagcaagtgttctctacttactcagacaaccaacctggtgtcttgattcaggtgtacgagggagagagagctagaaccagggacaacaatttgttgggaaaatttgagctttctggcattcccccagcacccaggggtgttcctcagattactgtttgcttcgatatagatgccaatggtatcttgaatgtctctgccgaggacaagaccacagggcagaagaataagatcaccattaccaacgacaagggtagactctcaaaggaggaaatcgagaagatggtccaggaagcagaaaaatacaaggctgaggatgaggagcacaagaagaaggttgatgcaaagaatgcattggagaactacgcctacaacatgaggaacaccattaaagacgagaagattgcatcaaagctctctggtgacgacaagaagaagatcgaagatgccattgagagtgctattcagtggttggatggaaaccagctggcagaggctgatgagttcgaagacaagatgaaggagcttgagagcacttgcaacccaatcattgctaagatgtaccagggtgcagatgttcctccatctggttccggtggtgctggccccaagatcgaggaagttgactaa

SEQ ID NO: 434 - DNA, 2784 bp, Glycine Max
atgaacggtgctcccaagcacgaacgccgctgggcgtccgacaccgtgccggagatggcattcgtcagcgccgggacttcgccgggaactgagtacaactccgtcaccgacgagtacgttgaggtcactctcgatgttcacgacgatcacaccatcgttctccgcgacgttgagccggtgactgtcgttaacatcgacgacggcgtcgcaacaagtggaaacgaaactccgacgtcctccgcgtggtcgccgtcgatcaggaggagctctcctaaccggtggcggcagttctcgcaggagctgaaggccgaggcggttgcgaaggcgaggcagttttcgcaggagctcaaggcggagctgcggtggttctcgtggagccaaggcggatctgaaacggcgttggtggctcgagatctcaggaagcagcgcgctcagcttgaccgcaaccgctccggtacgaagaaagcgctccgtggactgaaatttattagcagtaaatccaatggcgctgacgcctggaacgaggtgcaaagcaatttctatagtcttgccaaggacggttatctttatcgcactgattttgcgcaatgcatagggatgaaggactctaaggagttcgctctggaactatttgacgcgctgagtcgtagacgtagactgaaggttgaaaagatcagcagagacgagcttaacgaattctggtcgcaaattaccgatcaaagctttgattcgcggcttcagatattctttgacatggtggacaagaatgaagatggtaggatcaccgaagaagaagtgaaagagatcattatgctaagcgcttcagcaaataaattatccagattgaaagagcaggccgaggaatacgcagctctgatcatggaagagttagaccctgaaagacttggctacatcgagctatggcaactggagacgcttctgttacaaaaggacacgtatctcaactacagccaagcactaagctacaccagtcaagctttgagccagaacctacaaggactaagggcgagaagtccgatacgtaggatgagccgcagaatgctgtactatttgcaagaaaattggaggagactttggattttagcattgtggatttctgctatgattgggctgtttacgtggaagttcatcgagtacaagaggaaaaatgcttatcatatcatgggttactgtcttctcgcggccaaaggtgctgctgagactctgaagttcaacatggcacttatactcttgcccgtctgcagaaataccataacttggctcaggtccaccaagttggcttacattgcacctttcgatgataacatcaactttcataagacaattgctgcggcagtagtgattggtgttatacttcatgccgggaatcaccttgcttgtgattttcctagacttgtaaattcgtctgaaaaagattatgagacgtatttggatggcgtatttggtgatcataaacccagttacggagacctcattaaaggggttgagggtgtgacaggaattctgatggtgattttgatggcaatagcatttactcttgcaacaaaatggttcaggagaaatctcgttaagcttcctaaaccgtttaataggctcactggtttcaatgcgttctggtattctcaccatctatttgtgattgtttatgtcctgctcactattcatggtgtatatctttacctcgagcgcagatggcaccttcaaacgacatggatgtatcttgccgttccaattttactttatgccggggaaagaacgctaagattcttccgttctggtttctatacagtccgtctaataaaggttgccatttatcctggaaatgttctgacattgcaaatgtcaaagccgtctcaatttcgatacaagagcggacaatacatgtttgtgcaatgtcctgctgtttctccatttgagtggcatccgttttcaattacctctgcccctgatgatgactacctgagtgttcacatacggcaactgggagattggacacaggagctcaaaagggtattctctgcggcctgtgagcctcccttagctgggaagagcgggcttctcagggctgatgaaaccaccaagaaatgcttaccaaagttaaggatagatggaccttacggtgcgccagcacaagactacagaaactatgatgtcctgctacttgtcggtctcgggataggagcaacaccttttatcagcattctgaaagatcttctcaacaatatcatcaaaatggaggagctggcggattcagtctctgattcaagtagaggttcagaccttagcactgggagcgcagattcactatcttctaataagatttctcctaaacggaagaagacactgaagactaccaacgcatatttctactgggtaacaagagaacaaggttctttcgattggtttaaaggggtcatgaatgaagttgctgaacttgatcaaaggggcgttattgagatgcacaactacttaactagcgtatatgaggaaggagatgccagatccgccctcattacaatggtgcaagccctcaaccacgcaaaaaatggagttgatattgtttccgggactaggctgagaactcattttgctaagcctaactggaagaaagttttctctagaatatgctctaagcactgcaatggacgaataggggttttctattgtggcgcaccggttttggcaaaagaattaagcaagctctgcttcgagttcaacgaaaaaggtcaaacaaaatttgagttccacaaggagcatttctaa

SEQ ID NO: 435 - DNA, 1254 bp, Glycine Max; identical to SEQ ID NO: 250

SEQ ID NO: 436 - DNA, 2244 bp, Glycine Max
atgacgataaaacctgttgttcgtgtttcggaggggaagctggtggtgaaggagcgaacgattttgaccggaatgccggagaacgtggtggagacatcgacggtggaaggaatgtttctcggagtggatttcgagaaggaagacagtaggcaggtggtttcgttgggaacgttgaaggacgtccggttcatggcgtgcttccggttcaagctgtggtggatggcccagaaaatgggagatcgaggaagggacattccgttggagactcaatttctgttggtggaaaccaaagatgggtcccacctggagtcagataacgacaaaaaccagaaccagatcgtgtacacagtctttctacctctcgtggaaggctcattcagagcgtgcctccagggtgactccaacgaccaactccagctctgcctcgagagtggcgacgtcgacattaaaacgtcgtcgttcacccacgctctcttcatcagcgccggcaccgacccattcgccaccattcaccacgcattccgttcagttcggaaccacctcaagactttccgcctccgccacgagaagaaactccctggcatcgtggattgcttcggctggtgcacttgggatgctttctaccaggaagtcactcaggaaggagtcgaggccggaattcagtccctcgcaggcggcggcacgccgccgaagttcgtcatcatcgacgacggctggcagtcggtgggcggtgacgacaagaactcaaattcgttgcagaggctaactggaataaaagagaacgcgaagttccagaagaaggaggagccagaattagggattaagaacatcgtggagatagcgaagaagaagcattcagtgaaaaacgtgtacgtatggcacgcgatcacgggttactggggaggggttcgtccaggggtgaaggaaatggaagagtacggctccgtaatgaagtacccgaacgtgtcgagtggagtaacagagaacgagcccacgtggaaagtggacccgttagcggttcaggggttgggcctggtgaacccgaagaaggtgttcacgttttacgaccaattacacagttatctggcgtccgcgggtgtcgacggcgttaaggtggacgtgcaatgcatcttagagactctgggtgcaggactcggtggaagggtggaactcacgaggaattaccatcaggcccttgacgcttcgatttctagaaacttccctgacaatgggtgcatcgcctgcatgagccacaacacggacgcgctctactgctccaaacagacggcggtggtgagggcttccgatgatttctacccgcgtgatccggtgtcgcacactatccacgtggcgtccgtggcgtacaatagcgttttccttggggagattatgttgccggattgggatatgtttcactcccttcaccctgctgcggagtaccacgcttccgctagggccatcagcggtgggcccatctacgtcagcgacgcgccggggaagcataactttgatctgctcaagaaactggtcttgcccgatgggtcgattttacgggcccgtctaccaggaaggcccactaaggattgcttgttcaccgacccggcccgcgatggagttagtctgctgaaaatatggaatatgaacaagttgggtggggtgttgggggtttataactgtcaaggtgctgcctggagtgctactgagaggaagaatgcgtttcatagtacggactattctggtggtgatgccatcactggatatgtgagggcttgtgatgttcacctcattgcggaggctgctgatgacgcccatgattggaacggtgattgtgcgctctactctcaccactccgggcagctgattgttcttcctcacaatgtggcgctgccggtgtcccttaaggtgttggagcacgaggtgtatgctgttgcgcctattaagaaggttttgggtggtggctacagctttgcgcctcttggacttgtgaacatgttcaatgctggtgctgctgttgaagggctggtcttcgaggaggatgggttggttcgtttggagatcaaagggtgtggtaagtttggggcttattcttctgccagaccaacaaagtgtttgctgggaaaccatgagctgctggatttcgattacgatgctgattcaggcttgctcaccttcaacatagatcatttgccccaagagggacactgggttcacttagttgagttagtttacagtctttcttgttag

SEQ ID NO: 437 - DNA, 699 bp, Glycine Max
atgactaacttcccagtgatcaacttggagaagctcaatggtgaggagagaaacgacaccatggagaaaataaaggatgcttgtgaaaactggggattctttgagctggtgaatcatggcataccccatgacttattggacactgtggagaggttgaccaaagagcactacaggaaatgcatggaagagaggttcaaggaatttatggcaagcaaaggtctagatgctgtccaaactgaggtcaaggacatggattgggagagcaccttccacttgcgtcacctccctgaatcaaacatctcagagatccctgatctcattgatgagtacaggaaagtgatgaaggattttgctttgaggttagagaaactagcagagcagctgttggacttgttgtgtgagaatcttggcctagagaaagggtacctcaagaaggctttctatggatcaagaggaccaacttttggcaccaaggttgccaactaccctccatgccccaacccagacctagtgaagggtcttcgtccccacaccgatgccggtgggattgtccttctcttccaggatgacaaggtcagtggcctacagcttctcaaagatggccagtgggttgatgtgcccccaatgcgccactccattgttgttaacattggtgatcagcttgaggtaaatttatttcctattatttttaatatatga

SEQ ID NO: 438 - DNA, 921 bp, Glycine Max
atgactatcctcattgagcaatctgatcactttggggctgaagtagaggcaaagactgaaccaataaatgagagagaactggtgttggatggtggatttctgataacacagaccaactcatttgggcacatgtttagggcttataatgatgctgaaagtgagaggcatgaaggagtggagaacttctacagaaaaaatcacacttaccaatcaattgatttcgtgaagaaaatgagagaggagtacgcaaaattgaacagggtagagatgagcatatgggaatgttgtgaactccttaatgaagtggtggatgagagtgaccctgacttggatgaacctcagattgaacacttgctccagacagccgaagctataaggagggactaccctgatgaagattggttgcacctaactggccttatccatgatcttggcaaggtgctgaatttgcctagttttggaggacttcctcaatgggctgtagtaggggacatattccctgttggttgcagatttgatgagtccattgttcaccacaagtattttaaggaaaatccagactacaacaatccagcatacaacactaaatatgggatttactcagagagatgtggacttaacaatgtgatgatgtcatggggacacgatgactacatgtatctagtggcaaaggagaatgatactacactgccctctgcggctttgttcattataagataccattcattctatgcattacataaggaaggagcctataagcacttgatgaatgatgaggattttgagaatctgaaatggctccatattttcaacaaatatgacctttacagcaagagcaaaattcgaattgatgttgaaagggtcagaccgtactatctgtccctcattgaaaagtacttccctgcaaagctgaagtggtga

SEQ ID NO: 439 - DNA, 1059 bp, Glycine Max
atgagagaaatcatcagcattcacataggtcaggccgggatccaggttggcaactcctgctgggaactctactgcctggaacatggcatccagcccgatggcatgatgccaagtgactcctccttcggtgtagcccacgacgccttcaacaccttcttcagcgaaaccggatccggcaagcacgtccctcgcgccgtcttcgtcgatctcgagcccaccgtcatcgacgaagtccgttgtggcacttaccgtcaactcttccaccccgaacaactcatctccggcaaggaagatgccgccaacaactttgccagaggccactacaccgttggcaaagagatcgtagatctgtgcttggatcgcgtccgaaagctcgcagacaactgcactggtctccagggcttcctcgtcttcaacgctgtcggcggtggcaccggttccggtctcggatctctcttgttagagcgtctctccgtcgattacggcaaaaagtccaaattagggttcaccatttacccttcccctcaggtttcaaccgcagtcgtggagccctacaacagcgtcctctccacccactcccttctggaacacaccgacgtggctgttctcttggacaacgaagccatctacgacatctgtaggagatctctcgacatcgagaggcccacctacaccaacctcaacaggctcatttcccagatcatttcgtcgctaaccacttccttgaggtttgatggcgctatcaatgtggatatcactgagtttcagaccaaccttgtgccataccccaggatccacttcatgctttcttcttatgctccggttatctctgccgccaaggcctaccacgagcagttgtcggtgccagagatcacgaatgccgtgtttgagcccgcgagcatgatggccaagtgtgatcccaggcatggcaagtacatggcttgctgcttgatgtaccgtggtgatgttgttcctaaggacgtgaatgctgctgttgccaccatcaagactaagaggactgttcagtttgttgattggtataattttctctcattctaa

SEQ ID NO: 440 - DNA, 1329 bp, Glycine Max
atgagagaaatcctccacatccagggcggccaatgcggcaaccagatcggagccaagttctgggaagtaatctgcgacgagcacggcatcgaccacaccggaaagtacagcggcgactccgaactccaattggaacgcatcaatgtctactacaacgaggccagcggcggaaggtacgttcctcgcgccgtcctcatggatctggagcctggcacgatggactcggtcagatccgggcctttcgggcagatattccgccccgataattttgtgttcgggcagtccggcgccggcaacaactgggccaagggtcactacacggaaggtgccgagctcatcgattccgtcttggatgtcgtgaggaaggaggccgagaattgcgattgcttacaagggtttcaagtgtgccactctttgggaggtggaactggctcgggcatgggaacgcttctcatctctaagattcgggaagagtaccctgatcgtatgatgttgacgttttccgtttttccttcccctaaggtgtcggacactgttgtggagccgtacaatgccacgctttctgtgcaccagcttgttgaaaacgcggatgagtgcatggtcttggacaatgaggctctctatgatatctgtttccgtacattgaagcttgctacaccaacttttggggaccttaaccacctcatttctgctaccatgagtggagttacttgttgtctacgtttccctgggcagctgaactctgatcttaggaagcttgccgtgaatctgatcccattccctcgtctccatttcttcatggttggatttgcaccattgacatctagaggatcccagcagtaccgcaacctgactgtgccagaactgactcagcagatgtgggattctaagaacatgatgtgtgcggcagatcctcgccacggtcgttatttgaccgcatctgcgatgttccgtggtaagatgagcaccaaggaagtggatgagcagatgatcaatgtgcagaacaagaactcttcctactttgttgagtggattcccaacaatgtcaagtctagcgtgtgtgatatcccaccaaagggtcttaagatgtcatccactttcattgggaattcaacatcaattcaggagatgttcaggagagttagtgagcagttcacggcgatgttcaggcgcaaggctttcttgcattggtacactggtgagggaatggacgaaatggagttcaccgaggccgagagtaacatgaacgatctggtggcagagtaccagcaatatcaggatgctactgctgatgaggaagagtatgaggatgaagaggaggaggcttaa

SEQ ID NO: 441 - DNA, 1008 bp, Glycine Max
atgagagtaaagaaagaatccacgctagcacaaataaaaagaaccaaatttcagaagaaaaaagagtcacttgaaggttcaatgggcgaggaagagaaaaaattagaagaaagcaaagaggagaacaaaaaagcagaggaaccaaagaaggaagaagagaagaaagaggagagaaaaactgaggaatcaaaagatgacaaagaatctaaggagaaagttgcgccgtcagaaatcgtgcttaaagtgttcatgcattgtgaagggtgtgctcgcaaggttcgtcgctccctcaaaggattcccaggggtcgaagatatactcacagattgcaagtctcacaaggtggttgtgaaaggagaaaaagcggatccgctgaaggttctagagagactacagaagaaaagccatagaaaggttgaacttctctctccgatcccaaaaccacccacggaagaggagaaaaaaccccaagaggaacaagagaagcccaaaccagaggagaagaaagaagagcctcgggttatcacagttgttctgaaagttcacatgcattgcgaagcttgcgcccaggaaatcaagagacgcatcgagaaaatgaaaggggttgaatcagcggaagcggatctgaagaagtcggaggtaagcgtgaagggggtgttcgagacagcgaagctggtggagcacgtgtacaagaggacagggaagcatgcagtgatagtgaagcaagaggcagagaagaaagaagaagagaagaaagcagaggaagaagttgagaagaaaatggagaaagggagtggcgagggagaagaaaacaaggagaaaaaagaaggaggagagggtgaagccaaagcagaagaggcatccacagtgttggaggtgaaaaagagtgagtattattacaacccaccaccaaggtatggtggcatggagttctatgcatactctggaccagcgtaccctcctcagatcttcagtgatgagaaccccaatgcctgctctgtcatgtaa

SEQ ID NO: 442 - DNA, 1350 bp, Glycine Max
atgagggagatattgcacgtgcaaggtgggcaatgcgggaaccaaatcggttccaagttctgggaagtgatatgcgacgaacacggcatcgaccccaccggaaagtacaccggcgacgaggcctccgatctccaactggagaggatcaacgtctactacaatgaggcctccggcggaaggtacgttccccgggccgtcctcatggatctggagcccggcaccatggacagcatcagatccggcccatacggcaagatcttcaggcccgacaacttcgtctttggccagtccggcgccggcaacaattgggccaagggccactacaccgaaggtgccgagttgatcgattccgtcctcgacgtcgttcgcaaagaggccgagaattgtgactgcttacaaggttttcaagtgtgtcactcacttggaggaggcacgggttctggcatgggaacactgttgatatcgaagatcagggaggagtacccggacagaatgatgcttactttctctgtttttccatctccaaaggtctctgacacggttgtggagccttacaatgctactttgtccgttcaccaactagtggagaatgcagatgagtgcatggttcttgacaatgaagcactctatgacatttgcttcaggaccttaaaactcaccactcctagtgttggtgatctgaaccacctgatatctgcaacaatgagtggagtgacctgttgcttgaggttccctggacaactgaactccgacctgaggaagctagcagtgaacctgatcccattcccacgtctccacttcttcatggtggggtttgcacctctcacctcacgcgggtctcagcagtacgtgtccctcactgtccccgaactcacccagcaaatgtgggacgccaagaacatgatgtgtgccgccgatccccgccatggccgttacctgacagcatcagccatgttcaggggaaagatgagcaccaaggaagtggacgagcaaatgatcaacgtgcagaacaagaactcgtcctacttcgttgagtggattcccaacaacgttaagtcgagtgtgtgtgacatccctccgaggaacttgaagatgtcgtgcactttcattggaaactccacctcaattcaggagatgttcagaagggtgagtgagcaattcactgcaatgtacaggcgcaaggccttcttgcactggtacactggtgaaggaatggacgaaatggagttcactgaggcagagagcaacatgaacgatttggtggcagagtaccagcaatatcaggatgctactgctgatgaggatgagtacgatgaggaggaggttgaggagggggaacaagcttactag

SEQ ID NO: 443 - DNA, 1374 bp, Glycine Max
atgagggagatattgcacgtgcaaggtgggcaatgcgggaaccaaatcggttccaagttctgggaagtgatatgcgacgagcatggcatcgaccccaccggaaagtacaccggcgacgaggcctccgatctccaactggagaggatcaacgtctactacaatgaagcctccggcggaaggtacgttccccgggccgtcctcatggatctcgagcccggcaccatggacagcatcagatccggcccatacggcaagatcttccgccccgacaacttcgtcttcggccagtccggcgccggcaacaattgggccaagggccactacaccgaaggcgccgagttgatcgactctgtcctcgacgtcgttcgcaaagaagccgagaattgtgactgcttacaaggttttcaagtgtgtcactcacttggaggaggcacgggttctggcatgggaacactgttgatatcgaagatcagggaggagtacccggacagaatgatgctcacattctctgttttcccatccccaaaggtctctgacacggttgtggagccttacaatgctactttgtccgttcaccaactagtggagaatgcagatgagtgcatggttcttgacaatgaagcactctatgacatttgcttcaggaccttaaaactcaccactcctagttttggtgatctgaaccacctgatttctgcgacaatgagtggagtgacatgttgcttgaggttccccggacaactgaactccgacctgaggaagctagcagtgaacctgatcccattcccacgtctccacttcttcatggtggggtttgcacctctcacctcacgcgggtctcagcagtacgtgtccctcactgtccccgaactcacccagcaaatgtgggacgccaagaacatgatgtgtgccgccgatcctcgccacggccgatacctgacagcatcagccatgttcaggggaaagatgagcaccaaggaagtggatgagcaaatgatcaacgtgcaaaacaagaactcatcctacttcgttgagtggattcccaacaacgttaagtcaagtgtgtgtgacatccctcccaagaacttgaagatgtcgtgcactttcattggaaactccacctcaattcaggagatgttcagaagggtgagtgagcaattcactgcaatgtacaggcgcaaggccttcttgcactggtacaccggggaaggaatggacgaaatggagttcactgaggcagagagcaacatgaacgatttggtagcagagtaccagcaatatcaggatgctactgctgatgaggatgagtacgatgatgaggatgagtacgatgatgaggatgaggatggggagcatgctttcgaggaccagtaa

SEQ ID NO: 444 - DNA, 1353 bp, Glycine Max
atgagggagatccttcacgtgcagggagggcaatgcgggaaccagatcggttccaagttctgggaagtggtgtgcgacgagcacggcatagatccgacggggaagtacgtcggaaactcagatctgcaactcgagcgcgtgaacgtctactacaatgaagcctcgtgcgggcgcttcgtgccacgcgcggtgctgatggacctggagcccggaaccatggacagcgtgcggaccgggccgtacgggcagatcttccgccccgacaacttcgtgttcgggcagtccggcgccggcaacaactgggctaaggggcactacaccgagggcgccgagctcatcgactccgtcctcgacgtcgtgcgtaaggaggccgagaactgcgactgcctccaggggttccaggtctgccactcgctcggcggcggaacgggctccgggatggggacgcttcttatttccaagatcagagaggagtatcctgacaggatgatgcttactttctccgtttttccttcgcccaaggtctccgacactgttgttgagccttataacgctactctctctgttcaccagttggtggagaatgctgatgagtgtatggtgctggataatgaggcgctctacgatatctgcttcaggactctcaagttgaccactcctagctttggtgacttgaatcacttgatctccgcaaccatgagtggtgttacatgctgtcttcgtttccctggtcaactcaactctgatctgaggaaactggccgtgaatctcatccctttccctcgtctgcacttcttcatggttggatttgcgcctctcacctctcgtggctctcagcagtaccgtgcattgacagttccagagctgacacagcaaatgtgggatgccaagaatatgatgtgtgccgctgatcccaggcacgggcgttacctcacggcatcagccatgttccgtggcaagatgagcacgaaggaggtggatgagcagatgataaacgtgcagaacaaaaactcttcgtactttgtcgagtggattcccaacaatgtcaagtcgagtgtgtgtgacattgctcctagagggctctccatggcgtccacattcattggaaactcgacctcgattcaggagatgttcaggagggtgagcgagcagttcacggccatgtttaggaggaaggctttcttgcattggtacactggtgaaggcatggacgagatggagttcacggaggcagagagcaacatgaatgaccttgtgtctgagtaccagcagtaccaggacgccactgctgaggacgaaggggagtacgaggatgaggaggaagaggatggtgaagcagacgaccatatgtga

SEQ ID NO: 445 - DNA, 3225 bp, Glycine Max
atgagtttctccaagggttctcctggcagccagacgccgcgtgatttagaagctgggtctcctgctagcttctctgctgattttgatgatggagacgtttctgctgatccatttgacgttaccagaacaaagaatgctccggttcaacgcctcaggcgttggaggcaagccgcacttgtgctcaatgcttctcgtcgatttcgttacaccttggacttaaagaaagaagaagagaagaaacgagtattaagaattgttatagtgcatacacgggccattcaagccgcatatcgattcaaggaagctgggcaaatgaatggaattgtaaaatctccttcaagctccactggagaattttcggttggacaagaacaactttcttcaatttcaagggaccgtgatgctactgctctacaggaaaatggaggggttgtagggttatcacatttgttgaaaaccaatttagagaaggggattcagagtgatgatgctgacttgctgaaacggaggagtgcattcggctccaacaactacccacgaaagagtggaagaagttttttgatgtttatgtgggatgcttgcaaggatctgaccttgattattttaatggtagctgcaatggcttcattagcactggggataaaatctgagggtattaaggaaggatggtatgacgggggaagcattgcttttgcagttattcttgttattcttgttacagctataagtgattataagcagtctcttcagtttcaagacctaaatgagcacaaaagaaacatacatttggaggttattcgagatggtagaagagtcgagatctccatatatgatgttgttgttggtgatgttataccccttaacattggtaatcaggtccctgctgatggagttttgatcactggtcactctcttgcaattgatgaatcaagtatgactggggagagcaagattgtcgaaaaaaattctagtgatccttttctgatttctggatgtaaagttgcagatggcagtggaactatgctggtaacagctgttggtattaatactgaatgggggcttctaatggccagcatttcagaagacaatggtgaagaaactcctttgcaggtacgcttaaatggtcttgctaccttaattggtatcgttggactctctgtggctgtcgttgttctgatggtgctactggccagatatttctctgggcacactagaaacccagatggaagtgttcaatttatagcgggcaagaccaaagttggtgatgctattgatggagtaattaagatattcactatcgcggtcaccattgtagtggttgcagtgcctgaagggctgcctttagcagttaccttaacacttgcctactcaatgaaaaaaatgatggcagataaagctttggtgaggaggctttctgcctgtgagacaatggggtcagccacaaccatttgcagtgataagactggaacattgactatgaatcagatgactgtggttgaggcttggattggtggtgggaagaagattgctgatcctcatgatgtatcacagttctctcgtatgctctgctctttgctgattgaaggtgttgcacagaacactaatggaagtgtatatatccctgagggtggtaatgatgttgagatttctggatcaccaacagaaaaggcaatattagagtggggagttaagcttgggatgaattttgacactgccagatcaaagtcatcaattattcatgtattcccattcaattcagacaaaaagcgaggaggagttgcaacatgggtgtctgactctgaagtccatatacattggaaaggtgctgctgagatagtcctagcttgctgtacacggtattttgatgctaatgatcagttggtggagatggatgaagcaaagatgtcaacttttaaaaaagctattgaagatatggctgctgatagtctacgttgtgttgcgattgcctatagatcatatgaaatgaagaatgttccaactagtgaggaagaacttgctcactggtcattaccagaggatgatcttgttttattggctattattggcctaaaggatccttgtcgacctggtgtcaaagatgcagtgcagctttgccaaaaggctggggttgaggtaaaaatggtcactggtgacaacgttaaaactgcaagagcaattgctgtggaatgtggaatacttggttcaatttctgatgctacagaaccaatcatcattgaaggaaaaagatttcgtgccttgacagatgaagggagagcagatattgttgaaaagatattggttatgggacggtcatctcctaatgacaagcttttgcttgtgcaagcattgaggaggaaggggcatgttgtggctgtaactggagatggaacaaacgatgctcccgcactacatgaggccgatattggtcttgcaatgggtatccaaggtacagaagttgctaaagagagctctgatatcattattttggatgacaattttgcttcagttgtgaaggttgtcaaatgggggcggtctgtatatgcaaatattcagaaatttatccagtttcagcttacagtcaatatagcagcacttgctataaatgttgttgctgcatttaccaccggtgacatcccactaaatacagtacagcttctctgggtaaatcttatcatggatactcttggagcattagccttggcaactgaaccaccaactgattccctgatggatcaaagtccaaagggtcgaagagaacctcttgtatcaaatattatgtggaggaatctgctgatacaggctatgtaccaagtgtccgtcttgcttatacttaatttccgaggtgtgagcttactggctttgagggatgagcccaaccgccctgcaatcaaagtgaagaactctctgatatttaatgcatttgttctttgtcaagtctttaatgaatttaatgcccgaaagcctgataaattcaacatattcaagggagtcacaagaaactacctcttcatggggatagtaggaataactgttgtgcttcagattgtcatcattgaatatctcgggaagttcactaaaacagccaagcttaattggaagcagtggctcatttcagttattatagcatttatcagctggcctcttgctgtggtaggaaaattgataccagtaccagaggcagaactcagtaactttttccgaaaatgtcttcgtagacaaaattaa

SEQ ID NO: 446 - DNA, 1053 bp, Glycine Max; identical to SEQ ID NO: 263

SEQ ID NO: 447 - DNA, 879 bp, Glycine Max; identical to SEQ ID NO: 272

SEQ ID NO: 448 - DNA, 1350 bp, Glycine Max
atgcgtgagatccttcacatccagggtggccaatgcggcaaccagatcggcgccaagttctgggaggtggtttgcgcggagcacgggatcgaccccactggaaggtacggtggggactcagagcttcagctcgagaggatcaatgtctactacaacgaagccagctgcggccggttcgtgccgcgcgcggttctcatggacctcgaaccgggcaccatggacagcgtccggtccgggccgtacgggcagatcttcaggcccgacaactttgtgttcgggcagtccggggcaggaaacaactgggccaaggggcactacactgagggtgctgaactcattgattctgttctcgatgtggtgcgcaaggaggctgagaactgcgattgcttgcaaggttttcaagtgtgccattccctgggaggaggaactggatcaggaatgggtaccttgttgatttctaagatcagggaagagtacccagataggatgatgcttactttctctgtttttccttctccaaaggtttcggacactgttgtggaaccctacaatgctactctctctgttcaccagcttgttgaaaacgcagacgagtgcatggtgcttgacaatgaagctttgtatgacatttgcttccgtaccctcaagctaaccaccccaagctttggtgacttgaaccatttgatctcagctacaatgtctggtgtcacttgttgtttgaggttccctggtcaacttaactctgatctgcgaaagcttgcagtgaaccttattcccttccctcgcctccacttcttcatggttggatttgctcctttgacatctcgtggctctcagcaatacagggccttgagtgttccagagctgacacagcaaatgtgggattcaaagaacatgatgtgtgctgctgaccctcgacatggccgctacctcactgcctcagccatgtttagaggcaagatgagcaccaaggaagtcgacgaacagatgatcaatgtgcagaacaagaactcctcctactttgttgagtggattcctcacaacgtgaaatccacagtctgtgacattcccccaactggcttgaagatggcttcaacattcattggtaactctacctccattcaggaaatgttccgtagagtgagtgagcaattcactgctatgtttaggaggaaggctttcttgcattggtataccggggaaggcatggacgagatggagttcacagaggctgagagcaacatgaacgatctcgtgtcggagtatcagcagtaccaggatgccactgctgatgaggatgagtatgaagaggaagaggaggaggaggagtttgcccaacatgatatgtga

SEQ ID NO: 449 - DNA, 864 bp, Glycine Max
atggaagaacggtatgagccattgaaggagcttggtgctgggaattttggtgtggcaaggttggcaaaagacaagaaaactggagagcttgttgcggtcaaatacatagagaggggcaaaaagattgatgagaatgttcagagggagataattaaccaccgatctttaaggcatccaaatataatcaggtttaaagaggtgttactgacccctacacatttagctatcgtcttggagtatgcttcaggtggtgaactttttgagaggatttgtactgctggtcgatttagcgaagatgaggcaagatatttcttccagcagctaatatctggggttagctactgtcattcaatggaaatttgtcatagagatctaaaattggaaaacactctcttggatggaaatccatctcctcggcttaaaatttgtgactttggttattccaagtctgctctactgcactctcaacctaaatcaacagttggaactcctgcatacattgctccggaggttctgtcgcgaaaggagtatgatggaaagatttcagatgtttggtcctgtggagtgactctttatgtcatgttagttggtgcatacccatttgaagatccagaagatcctagaaatttcagaaagactattgggagaataatcggtattcagtactccatacccgactatgttcgtgtttcttctgactgtaggaatcttctctctcgcatctttgttgctgatcctgccaaggtatgtatcttcaattctacaaaatcatacattacatgcactatagtcatacaacctgtactattagaattacaaaatttcattgtaatgaaccttagatatacacatatctcacattaa

SEQ ID NO: 450 - DNA, 708 bp, Glycine Max
atggaaggcatagtacacaggacagttgaagtgaatggcataaaaatgcatgttgctgagaaaggtgaaggtcccgtggtcttgttcctccacggcttcccggagctctggtactcctggcgccaccagattctggctctcagcaacctcggctaccgcgccgtggctccagatctccgcggctacggagacaccgaggcaccagcttcaatcagcagctacaccatcctccacttagtttctgacatcgtcgcgctcattcactcacttgctgtggatcaagtcttcctcgtagcccatgattggggggctgtcataggttggtacctctgcttgtttcgccccgacagaatcaaggcctatgtttgtctcagtgtccctttcatgcctagaaaccctaaagtcaagcccgttgatgccatgcgggccctatatggagatgactactacatctgcagattccaggaaccaggcaaggcggaagctgagtttgccaacaatagcattgaacaagtaatcaagaacatactaacaagtcggagacctggaccaccaatcctgcgcaaagaaggagcaggttccaattccgatccttcaaggcctcttcccacttggctctcacaagaagatgtcacttattatgcttctaaatttactaagacaggcttaactgggggcctcaactactatagaaatctcaacctgtaa

SEQ ID NO: 451 - DNA, 1011 bp, Glycine Max
atggaggaacggtacgagccattgaaggagcttggagctgggaattttggtgtggcaaggttggccaaagacaaaaaaactggagagcttgttgcggtcaaatacatagagaggggcaaaaagattgatgagaatgttcagagggagataattaaccaccgatctttaaggcatccaaatataatcaggttcaaagaggtgttactgacccctacacatttagctattgtcttggagtatgcttcaggtggtgaactttttgagaggatatgtactgctggtcgatttagcgaagatgaggcaagatatttcttccagcagctaatatctggggttagctactgtcattcaatggaaatttgtcatagagatctaaaattggaaaacactctcttggacggaaatccatctccccggcttaaaatttgtgactttggttactccaagtctgctttactgcactctcaacctaaatcaacagttggaactcctgcatacattgctccagaggttctgtcacgaaaggagtatgatggaaagatttcagatgtttggtcctgtggtgtgactctttatgtcatgttagttggtgcatacccatttgaagatccagaagatcctagaaatttcagaaagactattgggagaataataggtgttcagtactccatacccgactatgttcgagtttcttctgactgtaggaatcttctctctcgcatctttgttgctgatcctgccaagaggatcaccatcccggagataaaacagtatccttggtttctgaagaatatgcctaaagagatcattgaagccgaaagaaaaggattcgaggaaacaacgaaagatcaaccaagccagaaggtggaagaaatcatgaggatcatacaagaggcaaggataccaggacaaggatccaaagcaggagaagttggacaagttggcactggatcattagatattgaggatgatgaggaaattgatgttagtggtgactatgaacaagtgtga

SEQ ID NO: 452 - DNA, 1083 bp, Glycine Max
atggatcgggcggcgttgacggtcggaccgggcatggacatgccgataatgcacgacagcgaccgttacgatctggtccgcgacatcgggtccggaaatttcggcgtggcgaggctgatgcaggataaacaaaccaaggaactcgtcgccgtcaagtacatcgaaaggggtgataagattgatgaaaatgtgaagagggaaattatcaatcacaggtctctgaggcatcctaacattgttaggtttaaagaggtaattttaacacctactcatcttgctattgtaatggaatatgcatctgggggagagctctttgagaaaatctgcaatgctggacgttttactgaggatgaggctcgattcttctttcagcaactcatatccggggtcagctattgccatgctatgcaagtatgtcatcgggacttgaagctggaaaacactttgctggatggaagctcggcacctcgtttaaagatatgcgattttgggtactccaagtcttcagtgcttcattcacaaccaaagtcaactgtgggaactcctgcatatattgctccagaagtattgttgaaacaagagtatgatggcaagcttgcagatgtctggtcatgtggagtaacgttatatgtgatgctagtgggagcatatccttttgaagatcctaatgaaccaaaggactttcgcaagacaattcagagagttcttagtgtccagtattccattccggacggtgttcaaatatctccagagtgtggccaccttatctcaaggatctttgtttttgacccagcagagagaatcaccatgtctgaaatctggaaccatgaatggtttctgaagaatctccctgcggacctgatggacgagaagataatgagcaatcaatttgaagagccagaccaacccatgcagagcatcgatacgatcatgcagataatttcagaagctaccgtgccagcggctgggacctattcttttgacaagtttatggaggagcaaatttatgacttagaatctgaatctgatgctgaatctgatcttgatattgatagcagtggggaaatagtgtatgccatatag

SEQ ID NO: 453 - DNA, 1029 bp, Glycine Max; identical to SEQ ID NO: 320

SEQ ID NO: 454 - DNA, 2334 bp, Glycine Max; identical to SEQ ID NO: 322

SEQ ID NO: 455 - DNA, 780 bp, Glycine Max
atggcattttctagttcctcaccatctataccagaaaaatacaagaaactcgtatcatctttcttcagttctccaaagctattcgccaatttcacatcgaaagtgttgtgtgaaactgaggctatgatgagtccaacctccatacttgacaccaagcccttctctggcttgaagaaccctttttggtcagaaacaaacagccccagaactccagttggtgaacacaagcgttattgggataagttggattcaaaggggcttgttgatgctcttggtgaaataacatcaaagtcacaaagcagaatgattctgtttggatcccagctcaagattcagaaccatcctcccctggcccattcaacactttctccatctctatctcctaaatctgcgtttgggtgtgccaattcagctcttgaaacctccaaatctccgagagttttctctgctagtgaaatggagctttcagaggactacactcgagtgatttcccacgggcctaaccctagaactactcacatatttgataactgcatcattgagagtcgctgttttgatgttggatgctcttcttctcccttggaaaatgtgtttcttcctcctcacatcagctacccctccgagaccttcatgagcttctgtttttactgcaacaaaaatcttgggcaggatatggacatctacatgtacaggggagagagggcattttgcagccgtgaatgccgtgaccagggaatgatgttggaggaaggtggagatatgcatatgggacatagttga

SEQ ID NO: 456 - DNA, 663 bp, Glycine Max; identical to SEQ ID NO: 353

SEQ ID NO: 457 - DNA, 177 bp, Glycine Max
atggctgcttccgcggcgagagcgggtcgtcgcgtgccggtcgggggacggattgggaacgggcccttcggggcctcttccccgggcgtcgaacagtcaactcagaactggtacggacaaggggaatccgactgtttaattaaaacaaagcattgcgatggtccctgcggatgttga

SEQ ID NO: 458 - DNA, 1950 bp, Glycine Max; identical to SEQ ID NO: 361

SEQ ID NO: 459 - DNA, 1206 bp, Glycine Max
atggctggaatttgctgtggtgttgtcggagaaggtgacactccggctccactcgagccaactactcgcccctccaggcgccggagtttggacatcttacccttaaaatacatcgctgacatggcggtgccgccgtcggatggttcacggaaacgtcccaagctggatctcagggaccgcgataacgtagttcaaaattgcgacgaatccactggacacaaggtggtgaaaaaagaagccaaagtggaaatccacgacaatatttccgaaacgaaaaacgtaactgttgcggatgcttcggaagttgaagattctcctaagttcggcgtgacgtcagtttgcggcaggagaagagacatggaagattccgtttcggtgcggccttccttcacccaaggcttccactactttggcgttttcgacggtcacggttgctctcatgtcgcgactatgtgcaaggagcggttacacgagatcgtgaatgaagagattgacagcgcgcgcgagaatttggagtggaagctgacgatggagaacggattcgctcgcatggacgacgaggttaatcgcaggagccagagcaaccagaccttcacctgcaggtgcgagctccagactccccactgcgacgccgtcggatccaccgccgtcgtcgccatcgtcacgccggacaaactcgtcgtttccaactgcggcgactcccgcgccgtcctctgccggaaaggcgtagccatccctctctcctccgatcacaagccggatcgacccgacgaactgctccgagtccaatccaagggagggcgcgtgatttactgggacggtcccagagtgcttggtgtgttagccatgtctcgagccataggtgacaattatctgaagccgtacgtgatttctgaaccggaggtgacggtgacggagcggacggaggaggacgagtgtttgatactggcgagtgatgggttgtgggatgtggtgtcgaatgaaaccgcatgtggtgtggtgaggatgtgcctcaaggcgcagaagccgccgtcgccgccgggatctccggggagtgacgtggcggcggacggttccgaccgggcttgctccgatgcgtcgattttgttaaccaagttagcgttggcgaggcatagttcggataatgtgagcgtggtggtggttgatttgaggagagatcaacgacaatcatcaaactccaattaa

SEQ ID NO: 460 - DNA, 939 bp, Glycine Max
atgggaaccgctataggcatgtacagcaacaacaacatcgtaccggatttcctagatccgtatagtgaagaactgatgaaagcacttatgccttttatgaaaagtgattatttctctgcctcttcttcttcttcttcacgcgaatcacacccttctcctcttattccatctaattctctcccctcctccaaccaaatcaggctcaaccaactcacccaagaccaaattctccagattcaggcccaaatccacattcagcagcagcacgtggcccaaggccaagcccacctgggcccaaaacgcgtccctatgaaacacgccggcacggccgcgaaagccgcgaagctctaccgcggggtgcggcaacggcattggggcaagtgggtcgccgaaatcagactccccaagaaccgcacgcgcctctggctcggaacattcgacaccgcagaggaagcagcattagcgtacgacaacgctgcgtttaagctcagaggcgagttcgcgcgtctcaatttccctcatctacgacaccacggagcgtttgttttcggtgagttcggagattacagacctctaccttcttccgtggattcgaagctgcaagctatttgcgaaagcttggcgaaacaagaggaaaagccgtgttgctctgtcgaagacgtgaagcccgtgatacacgctgctgagctggcagaggtggagtctgacgtggcaaaattgaacgctgaatatgtttatcccgagttcgaggattttaaggtcgagaacgagaacccaatgttgtcctcgtctgtgtctggcgaatcttcttcgcctgaatctggtgttactttcttggatttctcggacttctcggattctaataatcagtgggatgaaatggagaattttgggttggagaagttcccttctgtggagattgattgggcggcaatatga

SEQ ID NO: 461 - DNA, 1287 bp, Glycine Max; identical to SEQ ID NO: 369

SEQ ID NO: 462 - DNA, 1677 bp, Glycine Max
atgggcaacacatgccgcggatctttgaaagggaaatatattcagggcttcagccagcccgaagaccattccaagcgctccaccacccattctgatccctcctcaaccaagcagcaagacgacaacgacaacaacaacaacaacaacaacaacaacaacaacaacaacaacaacaataacaatcttcccttcaacgccaagagagaagccatcatgcgccgaggcctcgacaaccaagcctattatgtcctaggccataagactcccaacattcgtgatctatacactcttggtcgtaaattgggacagggccaatttggcaccacttatttatgcaccgagaattctacctccattgaatatgcctgcaaatccatctccaaaaggaagttgatttccaaggaggacgtcgaggacgttaggagggaaattcagataatgcatcatttagctggtcacaagaacattgtcaccatcaagggtgcttatgaggatcctctctatgttcatattgtcatggagctttgttccgggggtgagttgtttgatcgcatcatccagaggggccactataccgagaggaaggccgcggagttgaccaaaattattgttggggttgttgaggcttgccattcccttggggtcatgcatagagatctcaagcctgaaaactttctcttggtcaacaaagatgatgatttctctcttaaagcaattgactttggcctctctgtattcttcaaacccggtcaagttttcactgatgtagtcggcagcccatactatgttgctcctgaggttctcctcaagcattatgggcctgaagcagatgtgtggacagctggtgtcatactgtacatattgcttagtggcgtgccgccattttgggcagagacccagcagggtatatttgatgcagtattgaagggacatatagattttgactcagatccttggcctctaatatctgacagtggaaaagatctgattagaaagatgctgtgttctcagccttcagaacggttgactgctcatcaagtgttatgtcatccttggatatgtgagaatggagttgcccctgacagatcactggaccctgctgttctttctcgtctcaaacagttttctgcaatgaataagctaaagaagatggctctgcgagtgattgctgaaagtctatctgaagaggagattgctggtttgagagaaatgtttcaggctatggatactgataacagtggtgcaatcactttcgatgaactcaaagctggtctaagaagatatgggtctacccttaaggatatagaaatacgtgatcttatggaagcggctgatgtggacaaaagtggaaccatagattatggggagtttattgctgctacatttcatctcaacaaactagagcgtgaagaacatcttattgcagcattccaatattttgacaaggatggtagtggctacattacagttgatgaacttcaacaagcttgtgcagaacataacatgactgatgcttttcttgaagatattattagagaagttgatcaagataatgatggaaggattgattatggtgaatttgctgccatgatgcaaaaaggcaacgctggaattggtaggaggactatgcgcaacagtctgaatttaagcatgagagatgcaccaagtgctcaatag

SEQ ID NO: 463 - DNA, 1278 bp, Glycine Max
atgggctgtgtggtgtcagctccgaaggactctggtggaaatagaaggaggccagggagtattggtgaactttcagtatatgttcctggtttgaggattcctaaacctgttgattttgctcaatcacttggtgattatttgtccaagaatatagtggaacgcctgtctgctcttagaacgcgtatagttgtaatggctggtcaagaaggtcctacaattacaagaacaaaaagaaaaactcagcatggaggttcaacactggctgaccttctgcaggctcttgaggattacttgcctgttgttctgggattagttaagaatggaagccatttacagtataaagtacaatttacttgggtgaatcaagaggatgacaaagaggaaacaaccatgtctaatgcttggtatgaggtgttgtcagttttgcatttgatggcaatgctatcactatcacaggctaacttgttactgtttccaagatcatcatcctctaatggtcatctgccaaaagtatcagaagaaagcagacgagcctctgttgatatctttctaaaggctgctgggtatttggattgtgcagtcaaacatgttcttccacagttgcctgtggaactcaggagaaatttacctgtagacctagcagagggagttcttcgagcactctgtctacaagcattaggacaggctatagatatacaacttggaatggcaattgatagtaccaaagccactcttgctgtgaagcgtaggcttgcatgtgagatggtgaaatgttggcaacaggctcaagataacattatgaatcttccgttggcaaatggttggggtgaaaaacattgtctttttgtgaaatggaaatatgttgaagcaaaggctgcagcatattattatcatggtttgattcttgatgagggaaatacagaaaaatctcatgggatggctgtagctgctttgcaagcagcagatgagtatttcaaagaaagtaagaagttgtgtgaggcattcaacgcagcatctccattgtcaagaaattcaccaccttgggggaccatgaaatatctctctgaaaaaattcctaaggatacttcaagcaaggtgcgaataaaccgcgatttgtactcttatgaaaggatcatggagacagcaccaacattgcctgatttttcattggccttgaaaccagatgaatatcaacttcctcaagtggactcatcttggagaacagagaacataaaagtgggacaaactgatcctaaccatcttaagggtgacaagtga

SEQ ID NO: 464 - DNA, 990 bp, Glycine Max
atgggtgctacctctatggtccgaggaggagtcacgaggtttctaccccgaagggaatcattggggtgcgagaaactacaacttggagttggagatgtggagtttgaatttctcgatgatggtgagatgatgatgtcgttggtcaaaagtgatgaaagttctggcgatgagtttcgtcaatccaatgaaatggaattggatgatgatgatgatggtgagagggttgatggtggcagcgttgaggagaatagaagcttttgggataatcaacaccagcttttgcagaactacctatatagatcaacttctattgagtcaaggataaggaatgccaccaaagaagccgttcaggaaatacaaaacgcagaaatagtgtgcagttgcagtagacagataatttccagatcctgtagaaactgcttcattatagaagtctcaagacgccttcagaattctggttataacagtgccatttgcaaaacaaaatggagaagctcaccaagtaatattccatcaggagagcatactttcctagatgtaatagacagcacaagcaaaaagcaagaagttagggtgatcatagaactgaattttcgagcagagtttgagatggcaagggcaagtgaagagtacaacgggctagtgagcaagctccctgaggtgtacgtggggaaaatagagagattaagcaacatcatcaaggtgttgtgtatgggagcaaaaaagtgcatgaaggaaaacaaaatgcacatgggaccatggaggaagcacaagtacatgcaagctaagtggctaggttcatgcaaaaggaacacctcaacaactacttcatcacttaattcaatgatggggtattccgaggtggtgatgccaaaaccaaagcctagagcatcactgctaacagtggatctgatgctagaaaataataattttaagacagaaatgttgaagcttcccaatatgcattgtacagctgttgaagttttgtga

SEQ ID NO: 465 - DNA, 1458 bp, Glycine Max
atggtaggaagtgttgatgttctagctcatgattccagcattaatggaacaatgaaacagtggcctgaagatttcagttccatgacgattatgagagatcatgtgacactcacaattggagagaatggcattggcaatggggttgttcagaatggtacagaaaatggagaaagaaagatagtgcttggaagaaatattcacaccacgtgccttgaagtcactgagcctgatatagatgatgaggttactggggaaagggaagcttatatggcaggcgtgttggctaaatacaaaaaatctctgactgaaaggaccaactatcatttaggatacccctataatttgaattttgactatgatgcactctctcagcttcagcatttttccatcaacaacctgggggatcccttcattgaaagcaattatggtgtccactctaggcagtttgaggttggtgttttggactggttcgcgcggttgtgggaactcgagaaagatgagtattggggctatataacaaactgtggcacagaaggcaatctccatggcatcctagtggggagagaggttttccctgatgggattttatatgcctcacaggaatcacattattctgttttcaaagctgctagaatgtacagaatggaatgtgtgaagattaacactctttggtctggtgagattgattgtgatgattttaaggccaagcttctttgtcacaaggacaagccagcaattgtgaatgtgaacataggtacaactgtgaagggagcagtggatgaccttgatctggtaataaagaaactagaagaggcaggattttcacaagacaggttctatatccattgtgatggggctttgtttggtctcatgctgccttttgtcaaacgtgctccaaaaatttcattcaagaaaccaattggtagtgtgagtgtctcaggccacaaattcgtggggtgccccatgccctgtggcgtgcagataacacggttggagcacgtcaacgctctttccagaaacgtcgaatacctggcttcaagggacgccacaatcatgggaagcaggaacgggcacgcccccatattcctctggtacagcctcaacatgaaaggctacagaggcttccagaaagaggtgcaaaagtgtttgaggaatgcacactacttcaaagatcgccttgtggatgctggcattggagcgatgctgaatgagctcagcagcaccgttgtgtttgagaggcctcacgatgaagggtttgtgcacaagtggcagcttgcgtgccaaggaaacgttgcacatgttgtggtgatgcctaatgtcaccattgagaaacttgatgattttctcaatgagcttgtgcagaagcgtgctgtgtggtttagagatgggaactgtcaaccctattgtatagcttctgatgtaggacaggaaaattgcctctgtgctctgcacaggtaa

SEQ ID NO: 466 - DNA, 1218 bp, Glycine Max
atggtggacctggatgctcctctattggttatggagcagctgaagaaattggcccttttagaattaattctgatgggaattcactttactccaatccttatgcttggaacaacttggcaaatatactcttccttgattctcctgctggtgttggcttttcatattctaacacaacatctgatctgtatacagcaggtgaccaaaggacagctgaagatgcatatacattccttgttaattggtttgaaagatttcctcagtataagcatagagatttctacattgctggagaaagttatgcagttgtctcaacttgtttaccggagaaataaaggaatcgagaatccagttataaatttcaagggttttatggttggaaatgcagtcattgatgatttccatgattatattggaacatttgagtactggtgggtcaatggtttgatttcagattccacatataagaagctgggaattgcctgtgacttttattcttctgagcatccaccagagaattgtgtggaagctctcgaacttgcaactttggagcagggaaacattgatccatatagcatttatacaccagtatgcaatgatatagcagcaatcaaacgccgtttggggggtcgctatccatggttgtctcgagcatatgatccctgtactgagaggtactctaccttgtatttcaatcgtccagaagttcagaaggcacttcatgccaatgtaactgggattccttattcatgggcaggatgcaatgatgttattgtggaaaattggggtgattctccgctatctatgcttccaatatatcaagaacttattgaaggtggtatcagaatatgggtattcagtggagacactgattcagtagttcctgtaaccgcgtctcggtattcaatccgtgccttgaacctatctaccatcatcaattggtacgcttggtatgataatgacgaggttggtggctggagtcaagtttatgaggggcttacattggttacagtaagaggggcagggcacgaggttccacttcataaaccccgccaaggttttatccttttcaagacattcttggaggacaagaacatgccattgccaattgatagaagccttagtggcccaactgataaatcactgaacaagaacattcggttggctaggcccatacgcaagatcactatgccatcatcgacgcagggctttacttattag

SEQ ID NO: 467 - DNA, 1344 bp, Glycine Max; identical to SEQ ID NO: 388

SEQ ID NO: 468 - DNA, 648 bp, Glycine Max
atggtgttctacttcaaagcgcgccctgaagccggcgatttcaccatcttcatgggcctcgacaagttcgagaacgaggaactcatcaaatacggttttcccgaagacatctggttccatgttgataaaatgtcttcagcccatgtctatgtcaggctgcacaaaggccagactctcgatgacctgagtgaggctttactggaagattgtgctcagcttgtcaaagcaaattcaattcaaggaaataaagtgaacaatgttgatgttgtttacactccctggtctaatttaaagaaaactgcttcaatggatgttgggcaagttggttttcacaactcaaaaatggttcgaactgtgagagttgagaagcggataaatgagattgttaacaggctaaacaagacaaaagtggaaaggaaacctgatttgaaaggtgagcgagaagcagtcggtgcagctgagagagctgagaggaaacaacaactgagagaaaaaaaacgccgtgaggaattggaaaggcttgaaaaggagaaacaaacagagcttaggagctacaagggtttgatggttgcagaaaatatgacatccaacaaacaaattgcatcaggaagcaaatcattgcaggaactggaggaggatttcatgtaa

SEQ ID NO: 469 - DNA, 1134 bp, Glycine Max
atgtatggggtgaagagagttcttggaatcaatggaggatataggggcttctatgctcgcaatacaattactttaacccctaaaagtgtgaatgatatacataagcgtgggggaactgtccttggaacatcacgaggtggacatgacaccaaaaagatagttgacagtattcaagatcggggaatcaatcaggtttatataattggaggagatggaactcagaagggtgcatctgcaatttttgaggaagtcagaaggcgtggtctcaaagtttcagttgtaggtatccccaaaaccatagataatgatatcccggttattgataagtcctttggctttgacactgctgttgaggaggctcaacgagctataaatgcagcacatgttgaagctgaaagtgttgaaaatggcataggtgttgtcaagttgatgggtagaaacagcggatttattgcaatgtatgctacacttgcaagtcgagacgtggactgttgcttaattccagagtcacccttttaccttgaaggtactggtggactctatgaatatatagagaaaagactcaaagaaaatgggcacatggttattgtcattgctgaaggagcaggacaagaacttgtttctgagagcgtgcagtcaatgagcaaacaggatgcttctggaaataagctttttcaagatgttggcctatggatatcccaaaagattagggatcattttgctgcacagaagaccctgcccataactctcaaatacatagatccaacttatatgattcgagctattccaagcaatgcttctgacaacgtgtactgcacacttcttgctcaaagtgcagttcatggagcaatggcaggttacactggctatacaagtggacttgtcaatggaagacaaacttatatacccttctatagaatcaccgagagacagaaccacgtagtgataactgatagaatgtgggctaggcttttatcttcaacaaatcaacccagctttttggattccaagggtgacaatgaagagaagaaggaagaagaagcagcattgaatcagttaccggatggacattgttccaaagacacttctttggctaacaaagaaatcaacagcatttatcccacaacttgctag

SEQ ID NO: 470 - DNA, 1353 bp, Glycine Max
atgtatgtatgtatggatcctgctctcaagctctgcgtcttgttactcattcttctcggattagtgaatggttcttttgcggaaaatgattatggacgctgcgaaagcgttgttaagagttgggcgcgttcttcgctcgatgaggaaatgacaaaagatgataagcacacattaagagatttgctgttttttctgcatgttcctagaacgggagggagaacctattttcactgttttttgaagaaattgtatcccagctatctggagtgtcctcgctcgtatgataagttgcgctttgatccaagtaaaccaaaatgcaggctgttagttacacatgatgactatagtataacgtccaaacttccaagggagagaacttctgttgttaccatacttagggatccagttgaccgtgtttttagtacttatgaattctcaatagaggttgcagctagatttttggtgcatccaaacttgacgtccgcaacaaagatggctttacgcctaagctctaagactaaaggagtaagcacactggatatctggccttggaagtatctggttccatggatgagggaagacctatttgctaggagagaagctaggtacagtaggggactgaatatcattgaaagcaatgattcttatgacatggaagattttgcaatgccattacaagaatacatcaatgatcctgtggctgtggatgttgtacataatggagccacattccaggttgcaggtttgacaaacaattcttatatagcagaagcacatgaagtgcgccattgtgtacagaaatataagactcttggtaaatatgtgctacaagttgcaaagaagagactggatgagatgttatatgttggtcttactgaggagcacagaaaatctgccacaatgtttgcaaatgtggttggtgctcaagtgatatcacaacttaatgcaccaaacactagcctggaaactactgataagacagaaaggagttcatttacggataatgatcccgatagcagtgaacatcagaatagtaccttggacagaggagaaagtgcggttacttcaagtgaagggggagaagcaacagaatttaatatgactgttggagaactaatggatgcttatgaagtctgcatttccaatttacgtaaggcccagtcacgccgacgcatctcttctttgaagaggatttctccagtgaactttacaaaggaggcacgtcttcaggttcctgaagagattctccacaagatacggtctcttaatgaccttgacttacagctctatgaatatgcaaaagccattttcaataaacaacataaaacctcattgctgattactgaggtatga

SEQ ID NO: 471 - DNA, 645 bp, Glycine Max
atgtccgtcaaagagtgcggccaccactcctcccaacgccgcaacctcctccgcctcatcctcggcgccaccgccgccttcgtcctcctcatcctcctcaccatcttcctcatctgggtcatcctccgccccacaaagccccgcttcactctccaagatgccaccctctacgccttcaacctctccactcccacacccaacaccctcaccctcaccatgcaggtcaccctctcctcccacaaccccaacgcgcgcgtcggcgtctactaccacgcgctccacgtctacgcctcctaccggagccagcagatctccctcgccaccgcgctccccgacacctaccagggccaccgcgacttcgccgtctggtcgccgtttctattcggtaacgtcgtccccgtctcgccgtttgtgctcagctcactgcagcaggaccagagcgctgccggcgccgttttggtcaacgttaaggtcaacgggagggtcaagtggaaggtcgggtcttgggtctctgggaggtaccatatctatgtgaactgtcccgcgtatattagcttcgccggagatcggagcattgccgccggaggactcgtggcttcgccggtgaagtttcgcctcttgcagagttgcagtgttgatgtgtag

SEQ ID NO: 472 - DNA, 693 bp, Glycine Max
atgtcctcttcttccttctcccccgccactctcaccaccgagcaggagctttccgtcatcgttgccgcccttaccaacgtcgtcgccggctccacctccgcctccagctccttctccctccccgaattccgccttccacagacctctgatcctctcgccgccgcctgcctaatgccgccgccgccgccgccgagcatggacacttgtcgcgagtgcaacatcgcaggatgcctgggatgcaactttttcccggaggagaaaaagaagcagaagagggccaagaagaagtacagaggcgtgaggcagaggccctggggaaagtgggccgcggagattcgcgaccctcgtcgtgctgcccgggtctggctcggcacgttcggaaccgccgaggatgccgcccgggcctacgacaaggccgcgattgagttccgcggcccacgggccaagctcaatttccccttggtggacgagtcgctcactttgcagcagagcgagccagagagggttcaaacagaagaagagcaaataaagacagagaatctcaatcaaggtatggaaatggattcattcgggaacaaggataccgaattctgggacaggattaacgaagctgattttcatcagctcatgatgatgatggattttgctggagattcttccgactctgccactgggaacgctcttagttcttga

SEQ ID NO: 473 - DNA, 2079 bp, Glycine Max
atgtcgcattcgtcggggaagccggtttccgaggtggtcggcatagacgccaccttctccgatcggttccgcgacgccctcacctgcgacgacaataacaacattaacaagcccgacttccgagaactcgatctgggctcgccggtctcgccattgcggaccacgcgcgggcctgctgccagtagcagctccagctcctccggttccttttcgggccgaaccggacccacccgaaagcccgaatcggcacaaaataatagcaacaccaacactcacattcacagcaataacaacaactccggtgaactttctggttcgagtgagaacagtcccactgcgcgcaagccgggtcacacgagatctgactccggatctgcgcccgttcccttgatatattccggtcagacagcgacctcgcctgtgatgaatgttcttcccacaggaaacatttgtccatccgggaagatcctgaagacggggatgactccgaatcggagtagcagaactagtagaagcgatgtgttggggtcggggatggggaactatggccacgggagcataatgcgcggcggagggaaggctgagccggcgagtactcgcggcagtggcggcgggaatgagatggtgaagagagggggacacgtgcagagtgtggatccggaagagttgaagaggttggggaatgagtgttacaaaaggggaaactttgttgatgcgttgagtctctatgatcgcgcgattgcgatgtcgccggcgagtgccgcttaccggagcaaccgtgcggcggcgttgacggggctcggaaggttgggtgaggctgtgagggaatgtgaggaggctgtgaggttggatcctaattatgggagggctcatcagcgtttggcttctcttttccttaggttgggacaagttgagaatgcaaggaagcacctttgttatcctgggatgcagccagatccgtctgatatgcagaggttgcaagtggtggaaaagcatatcagcaaatgtggggatgtacggagggttggggattggaagagtgttctcagggaagttgatgctgctgttgctgctggagcggattcttcttatcagctctttatgtgtagagcagaagcgtttttgaagctccaccagattgatgatgcggaatcaattttgttgcatattcccaaatcagagccgcacactaattcctcttctcaggcaaggttttttgggatgctatgtgaggcttattcctattttgtcagagctcagattgagatggcattgggaaggtttgagaatgcggttacagctgctgagaaagccagtcagaatgattcccggaatgttgaagttgctgttttgctcaacaatgtcaggatggtggcaagggctcgagtgcggggaaatgatctttttaaatctgaaaggtacactgaagcttgcttggcgtatggggaaggtttgagacttgacccttcaaattccgttctatattgcaatagagcagcttgttggtttaagcttgggcaatgggaaaggtcaattgaagactccaaccaagctttacatatccaaccaaattacaccaaggctcttcttcgaagagctgcatcaaacagcaagctagaaaggtgggaggaagcagtcaaagattatgagatcttgcggaaagaacttccaaatgacaatgaagttgctgaatctcttttccatgcacaagttgccctaaagaaatcacgtggagaagaagtaacaaatttaaaatttggtggtgaagtggaagaagtctcaggtcttgagcagtttagagctgcaatttctttaccaggtgtatctgttgtccattttgaagttgcatctaactcgcaatgcaaacaaatatcgccatttgtcaatacactatgtggtcgatatccatctattaacttcctcaaggtggacattcaacaaagcccaacagttgccactgcagagaacgttaggattgtaccgaccttcaagatatacaaaaatggctgccggctgaaggaaatcgtatgccctagtcacgacatgttggaacactctgtgaggcattacagcttttag

SEQ ID NO: 474 - DNA, 723 bp, Glycine Max
atgtctaaaatagatcccccatttgatcgaggaagcataagaagaatactcatacaaactgtaagtgcttccaagtgtagaaaaggatcactaagatattggctctcggcaggacctggcgactttcagttatctccctcttgttgccaccgatcaagtctgtatgcgatagtaatacaggatctgtcaccatcctcacctaatttcaggggcgttaaagttgtcacttcatctattcccattaaacaccccaagtttgctatcactaagagtgtgaactatcttccaaatgtgctctcaaaggtggaagctgaagaagctggtgcttttgtaggcatttggcttgatggtgaaggttttgttgctgaagggcctaatatgaatgtggcctttgtcactaaagataaggaacttataatgccacactttgacaaaattctaagtggctgcacagctaagagagttttaacccttgctgagagcttgttaagggagggtaagcttaaagggataagggtgaaaactgtgactgtcgaggaaggtaagcaagcagatgaaatgatgcttcttggcagcggagttcttgtttgccctgtagtgcaatgggatgagcaggttattggtgatggcaaagaaggccctataacgcaggctctcttaaatctaattgttgaggacatgaaatcaggtccctccactgttcgtatacctgttccttattga

SEQ ID NO: 475 - DNA, 2502 bp, Glycine Max
atgtggcctgatttgattgcaaagagcaaggaaggtggggcggatgtgattgaaacttatgttttctggaatgggcatgagccagtgagaggacagtataattttgaagggagatatgatcttgtgaagtttgtgagactagctgcatcccatggactctatttctttctccgcataggcccttatgcgtgtgccgaatggaactttgggggtttccctgtgtggttgcgtgatatccctggtattgaatttcgaacaaacaatgcacctttcaaggaggagatgaagcgctttgtctccaaggtggtgaatctgatgagagaggaaaggctgttttcttggcaaggtggtcccataattttgttgcagattgagaatgaatatgggaacattgagaattcctatggtaaaggaggtaaagagtatatgaaatgggcggctaagatggctctaagtcttggtgctggggttccatgggtcatgtgtagacagcaggatgctccatatgacattattgatacatgcaatgcatactactgtgatggatttaaaccaaactctcataacaaaccaacgatgtggacagagaactgggatggatggtatacacaatggggtgaaagattgcctcatagacctgttgaagaccttgcttttgcagttgcacgttttttccaacgtggaggaagctttcaaaactattacatgtattttggcggaacaaattttggccgcactgcagggggacccttgcaaattacaagttatgattatgatgctccaattgatgagtatggtctgctgcgtgaaccaaaatggggtcacttgaaagatttacatgctgctttgaagctttgtgagcctgccctggtggccactgattcaccaacatatataaaattgggtccaaagcaggaggcacatgtgtaccaagcaaatgttcaccttgaagggttaaacttgtctatgtttgaatcttcaagcatatgctcagcatttcttgccaacattgatgaatggaaagaggcaactgtgacctttcgcggtcaaagatacactataccaccatggtctgtgagtgttttgccagattgcagaaatacagttttcaatactgccaaggttagagcacaaacttctgtcaaactggtagagtcttatttgccaactgtctctaatattttcccagcccagcaattgaggcaccagaatgacttttactacatctcaaagtcttggatgactacaaaagagccactcaatatatggagtaagagcagtttcactgtagaaggtatatgggagcacttaaatgttacaaaggatcaatctgattacctttggtattcaaccagagtatatgtttcagatagtgacatcttgttttgggaggaaaatgatgtccatccaaaacttactatagatggtgtccgtgacatattgcgtgtattcatcaatggccagcttataggtaatgttgttggtcattggatcaaggtggtccagactcttcaatttctcccaggatacaatgatttaacactgttaactcaaacagtgggtttacagaattatggcgcttttcttgagaaggatggagcagggattagaggtaaaataaagatcactggatttgaaaatggagatatagatctttcaaaatcattatggacctatcaggttgggcttcagggtgagtttttaaaattttacagtgaagagaatgaaaattcagaatgggtagagttgacccctgatgccatcccatccacatttacatggtacaagacatattttgatgtccctggtggcatagatccggttgctctagacttcaaaagcatgggaaaaggtcaggcttgggtgaatggtcaacatataggaagatactggactcgggtttccccaaaaagtggatgtcaacaagtctgtgattatcgtggagcatataattccgacaagtgttcaacaaattgtggaaaaccaacccaaaccttgtaccatgtgccacgatcatggttgaaagcaaccaacaatttacttgttatcttagaggaaaccggaggaaatccctttgaaatttcagttaagttacattcgtccagaataatatgtgctcaagtgtcagaatccaactatccacctttgcaaaagttggtgaatgcagatctcattggtgaagaagtttcggcaaataatatgatacctgaactgcacttacattgtcaacaaggacacacaatttcctccgtagcatttgcaagctttggtactccaggaggtagttgtcagaatttttctagaggaaactgccatgcacctagttcaatgtcgatagtttctgaggcttgccaagggaaaaggagctgctccatcaaaatctcagacagtgcattcggggtagacccgtgtccgggtgtggtgaaaacattgtcagtggaagcaagatgcacatcaccattgagtgatgacttctttcaagaggctgttagcagcttctaa

SEQ ID NO: 476 - DNA, 789 bp, Glycine Max
atgttgtttgaactccgtaatgatgctgccgagcgggtttctcattgtggggttctggagttcattgctgaggaaggcatgatatacatgccatactggatgatggagaacatgcttttacaagagggggacattgttaaagtgaaaaatgtgacacttccaaaggggacatatgttaagttacagcctcacacaaaagacttcttggatatttccaatccaaaagctatcttagaaacaacattgaggaatttttcctgcttgactactggagatagcatcatggtggcttacaacaacaagaaatattacatagatattatagaaactaagcctgacaatgccataagcataattgagactgactgtgaggtggactttgctcctcccttggattacaaggaacctgaaaaacccattgcacccctttctgccggaaaggcagcagtggctgctgaggagacccctgctgaagaggagcccaagttcaacccattttctggaactgggagacgcttggatggaaaaccattaaattatcagcctcctccagtttcttcttcagggtccaaggaccagaaatctgatgttgtcaattcgctgtcttctacagcttctagttcacaaagtaatgctcgtcaatctcagggcaagcttgtgtttgggtcaaatgcaaaccgtactaatgagacaggaaaggcgaaagagtcaaaaccagagccacctaaagagaaagaagagccgaaatttcaacctttttcagggaagaagtattctttacggggttaa

SEQ ID NO: 477 - DNA, 747 bp, Glycine Max
ccatgctttgatcacctagaactgaagccactaccactcaaactaggaagttctgatagcactgctaagcaaaacaagaagacatgtgttgtattactgaaactaacacaaggacaagtggggaagctcaaaaagaaggccaatgaccaacccatgaaagaagggtcaagagtaagaccttatagtagatttgaagctattgctgctcatatatggagatgtgcatctaaggctcgtgaacttgatgagaaacaaccaaccctagttcggttcaacagtgatattcgcagcagacaaattccacctcttcctaggacttactttgggaatgctttggcagcaacagttacacccgaatgttgtgttggagatatcttatcaaaatcattgagctatgctgcccaaaaagtaagagaagcaattgaaatgcttacaaatgagtacataaggtcacagttagatattgtattaggtgaggagcaattggattgcataaaggctttattctcgggacaaggagaacgtaggaatgcaccatttgcagggaatccgaatcttcaaatcacaagctggatgagcattccactttatgaagcagattttgggtggggaaagcctgattatgttgttatgggatatgttccagaaaatgatggttctgtgattgtgataatgtatttccagatagcacatatgcatctctttaagaaattcttctatgaggatgtatttacatcaaggttgtaa

SEQ ID NO: 478 - DNA, 333 bp, Glycine Max
ccccaacccaaccctaaccctaagcccgaattccaatcacatcctaatcctaaccctaaccctgaccccaatccaaatcctaatcccaatccttcaggtggcttgtgcccccgtgacgcactcaaactaggcgtatgcgccaatgtgctaaatgggttgctcaacgtgactttgggccaaccactagttaccccttgttgctccctcctcagcggtcttattgaccttgaggcggcagtgtgcctttgcactgccctcaaagcaaacatcctaggcatcaacctcaacctttcaatctcactcagcttacttctcaatgcttgctcaaggcaa

SEQ ID NO: 479 - DNA, 294 bp, Glycine Max
ggaggcaagggtttgggaaagggtggagcgaagaggcatcgcaaggtgctccgcgacaacatccagggaatcacgaaacccgcgattcggaggctagccagaagaggcggcgtgaaaagaatcagcggcttgatctacgaggaaaccaggggtgtgctcaagatcttcctcgagaacgtcattcgcgacgccgtcacctacaccgagcacgctaggagaaagaccgtcacggccatggacgtcgtttacgcgctcaagaggcagggaagaaccctctacggtttcggaggctga

SEQ ID NO: 480 - DNA, 255 bp, Glycine Max
gggctccgcccagtgcctcccgaaaagggaatatattcattggaccacatgcatttgtgtgacctagagaagatagaatatctcaattgcacttctaaaaaaaaaaaaaaaaaccctacaatgtcgcatggagaagaacttgatggcaaagcaagccctgttttctttcatcaaatatacttatggagagaaataagggtagtgtattttatggggaagaagaagaagaaaataaaagcttatctcataagctaa

SEQ ID NO: 481 - DNA, 1406 bp, Glycine max
agccaaaagtttgttttcatagtgtgttttgtttcccaaatcctactcttgtgaccacaacccttcctcctctttcttttgaaacctctttttttctattccccaaccaaacaagcaaacgctactcactcatcatcactgagatcatggctcctaatatcaccactgtcaaaaccaccatcaccgacgctcaagccaaggtcgccaccgatcatggtcgtgcctacgtcaccttcctcgccggaaacggtgactatgtgaaaggtgtcgttggcttggcaaaaggtctgagaaaagtgaagagcatgtaccctctggtggttgcagtgctacccgatgttccccaagatcaccgcaacattctcacctcccaaggttgcattgttagagagattgagcccgtgtaccccccagagaatcaaacccagtttgccatggcatattacgtcatcaactattccaagctacgtatttgggagtttgtggagtacagcaagatgatatacctagacggtgatatccaagtttttgacaacattgaccacttgtttgacttgcctgataactacttctatgcggtgatggactgtttctgtgagccaacttggggccacactaaacaatatcagatcggttactgccagcagtgcccccataaggttcagtggcccactcactttgggcccaaacctcctctctatttcaatgctggcatgtttgtgtatgagcccaatttggctacttaccgtgacctccttcaaacagtccaagtcacccagcccacttcctttgctgaacaggattttttgaacatttacttcaaggacaaatataggccaattcctaatgtctacaatcttgtgctggccatgctgtggcgtcaccctgagaacgttgagcttgacaaagttaaagtggttcactactgtgctgctgggtctaagccttggaggtacactgggaaggaggagaatatggagagagaagatatcaagatgttagtgaaaaagtggtgggatatatatgaggatgagactttggactacaacaatccactcaatgtggataagttcactgcggcacttatggaggttggtgaagtcaagttcgtccgtgccccatctgctgcttaagagtgtctttggaaatcaagtgtgatccaagtacatgtacaaagtcatacatcattacattaacttttatgtatttctaaaagtcatacatcattacattaagttttatgtatttctaaagtcttaagacttaagaggaccttttttatgtgtcccggcttttctttttttctttttccaattctgtcattgtaaagcaggtgaataccggtatccttaattttataaatggatatgaattttattttgcaaaaaaaaaaaaaaaaaaaaaaa

SEQ ID NO: 482 - DNA, 3216 bp, Glycine max
aaaacatagtcttttggtttgtccagttcagtggttcacctcacacccttttgttcttcatccatttggtttacccttcgtggtgtggaccttgtttgtgagatgaatattggtggttattattgaggattgactaccttggatggaacttgtttgttatgtgggtatatattgtctcaaatcagtgtgagttagcttgtgattgattgattgattgcaaggtttacaaggtcacaaggatggtgtcaaaatcctattcaaacctattggagttggcctctggagaggctccgtcatttgggtacatgaacaggagaattccaaggattatgactgtggctgggttgatatctgatgttgatgatgacccagtggagagtgtgtgctctgatccgtcgtcgtcaaccgcgcaccgagaccggataatcatggtggctaatcagcttcccataagggctcagaggagaccaaatgggaataataggagttgttggtcttttgagtgggatgagaatgcacttcttcagctgaaagatgggttaggggatgatgatattgaggtcatttatgttggatgccttaaggaggaggttcatccaagtgaacaagatgaagtttcacagacacttcttgagaccttcaagtgtatcccgacttttctccccgctgaccagtttactaagtactatcatggtttttgcaagcagcagttgtggccactgttccattacatgttgcccttgtcacctgagctcggtggcaggtttaataggtcactgtggcaggcttatgtgtcagtcaataaaatttttgcagataggattatggaagttattaaccctgaagatgattatgtgtggatacacgattatcatctgatggtgttgccgactttcttgaggaagagattcaacagggtgaaactgggcttcttccttcacagtccattcccttcatcagaaatatataaaacattgcctgttagggaagagatcctgagagccctccttaattcggatttgatcggcttccacactttcgattatgcgcggcatttcctctcctgttgtagccggatgcttggccttacctacgaatccaagcggggatatattgggattgagtactatggtaggactgttagtatcaaaattcttcctgtcggtattcacttgggtcagcttcaatcggttttgaggatgcctcagactgaagaaaaagtttgcgagctcattagacagttttctgataaaggcaggacattgttgcttggtgtggatgacatggatattttcaagggaataagtttgaagttgttggccatggagcagcttctcattcagcatcctgagtatcgggaaaaggtggtgctggtccagatagctaatcctgcgagggggcgagggaaagatgtgaaagaagtgcaagccgagacgaaggccacggtgaaacgaattaatgaaacatttgggaaacccgggtatgatcccgtcattctgatcgaggagcctctcaagttttatgagagagttgcttactatgttgtcgcggagtgttgtttagtcactgcagtaagggatggaatgaatctcataccgtatgaatatatcatcagtcgtcaaggaaatgaaaccttggataaagttttgggtctagcttcctcccctaagaagaaaagcatgttagttgtgtctgaattcattggctgttccccatctttaagtggagcaatcagagtgaacccctggaatattgatgcagtagctgatgcaatggactcggcgctggaaatggctgatttggagaaggagcttaggcatgaaaagcattatagatatgttagtactcatgatgtcgggtactgggctcgaagcttcttgcaagatttggaaaggacctgtagtgatcatgtgcgacgaaggtggtgggggattggttttggattaagctttagagttgttgcgcttgatccaaacttcaagaagctctcaatggagcacataatttcagcttacaagcggacggcaactagggcaatccttcttgactacgatggtacactaatgcctcaatcatccaccattgataagagtccaagcagtaaatccattgaaattcttagtagtttgtgtagagataagaacaacatggttttccttgttagtgctagaagccgaaagatgctttctgaatggttttgtccttgtgagaatctgggagttgcagctgagcatggttactttctaagaatgaagcgagatgaagagtgggaaacacatgttgcggcaacagacactagttggaaacaaattgcagaacctgtaatgaaactttatactgaaacaaccgatggatccaccattgaagacaaagagactgcacttgtttggtgctatgaggatgcagatccagactttggatcatgccaagctaaggacttctcgatcatcttgaaagtgtgcttgcaaatgaaccagtaacggtcaagagtggccagagcaatgtagaggttaaaccacagggtgttagcaagggactagtggccacacgcctactttctgccatggaagaaaaggggatgtgccctgattttgttttgtgtataggcgatgacaggtctgatgaagacatgtttgaggtaatcaccagttcgatggggagtccgatcgcggcaaaggccgaggtattcgcgtgcacggtttgtcgaaaacccagtaaggctaagtactacctggatgatacaactgaaatagtgagattgcttcagggcttagcctgtgtttcagaacaaatagacaaatagtttcattttcttcggaacaaaaaatagtttgttaagctctgggaacaaaggtggtggtggtgatgagaggtattataaatacattgtactttgctttactttgtcattgaggatgtaggctcagttgtgctgctcttaaaatcttaatacacaattaatattattggtttccttgatattccatgtatattatccctagtttttactgagaaaagttctgtatcggattctgctccttaaaatgcttgatttctatcaggaaaacttgtacatatagtattatagttagttggtttctttccagccatgaactcttgaacattcctttgacccatggatgtttagatgtgaacatgatgctgtgaaatggtatgtgtattagttttgtttgcggtagtaatctagtgaatttg

SEQ ID NO: 483 - DNA, 2358 bp, Glycine max
acggatgactatatagtgtgctatgcacctaccatgataacaacaaatggggtgtggcaaggagacaaccctttggaatattctctccctctcttcatcttgcaattgactttggttgtggttgccacccgcatattcgtcttcattctcaagccttttcgccagccacgagtaattgctgaaatcttgaaaatagtccttaaaagaaaagaaaaagtgacaagtagaagattgaaattgcaaggtggagtgatgttgggtccttcggtgcttgggcaaaaccaagcatttgccaatgcagtgtttcctctaagaagtgtgatggtgattgaaacaatggcaaacattggtctcctttattttctgttcttggtaggggtggagatggacatgacagtgatgcgcagtgttggtagaaaagctgtggcttcagcaatagctggcatggttctaccattcgtggttggaattgtcttctcctaccttttggccgaaagaactgattctgacataaaccaaggcacttttatactattcctcggtgttgctctctctgtgactgcatttcctgttcttgccaggatccttgcagagcttaaacttattaacacagagttggggaggcttgctctttcagctgcactcatcaatgatgtgtgtgcttggattatgttagctttggccattgcattagctgagtctgaagccactaccttggcttctctctgggttctaatttcaagtgcagcatttgtggccgtttgtgtttatgctgttaggccagcagctgcatggctagttaagaaaacccctgaaggtgaacccttcagtgagttttatatatctcttattctagccggggtcatggtctcaggcttcatcactgatgctattgggactcatgctgtttttggagcttttatgtttggtttgtcaatcccaaatggacaactcagttttactcttgtggaaaagcttgaggacttcgtttcaggacttctactccctctcttctttgccatcagtgggctaaaaactaacctagggctcatccatgggtcacacacctggttaattcttcttctagtcatttttctggcctgcattggtaaagttgctggaacgattttggttgcattgttttatcaaatgccaatacatgaaggagctgcccttggtttgctcatgaacacaaaaggccttgttgaaatggttgtgcttaatgttggcaaggaccagaaggtttttgacgaagaatcatttgcaattatggtggttataacagtgataatgactggaattattgtacctgccatatcaataatttataggccatcaagaaatagcatatattacaaaagaagaagcattgagatgtcaaaattagataccgagttcagaatactagtcttctctaatccaacaaagaactccccaatatgtgtgtatgtgctccatttggtggagctgagtgggcgtacatcagccattctcattgttcacaacactgcaaaacaagatgcccctgtccttaatagaaccgaagcacaatctgaccacataatcaaagcctttgaaaactatgagcagcatgcttcatacatctcagtccaacccttaacagcaatctcccgttactcgaccatgcatgaagacatatgcaatttggcagcggacaaccgcgtgtccctcgtaattgttccattccacaaacaacaaacggttgatggcggcatggaagctacaaacatggcatacagatccatcaaccagaatgtgctagcaaatgctccttgctcggtaggaattctagtggatagaggcttaagtggctctaacaacttggcaggaaatcaagtatctcaccatgtagcagtcttgttctttggaggaccagatgatagagaggcattgtgctatcgatggagaatggtcgaacatcccgggattagcctcaccgtaatgcgttttgtccaaactgatcaagtacaacttgagcctttcagccaacaacaacaacatggtagtattgatttccatcaaccaagggtcctcacagtgcaaacagatagggatatacagaagcagcttgatgaaaagctaatacatgagtttaggatcaggtgtgaggatgataattcggttggttatgttgagaagctcgtctccaatggggaggacacggtggcagcaataagaacaatggatgacattcatgatcttttcattgttgggagaggtcaaggggtcatttcacctctcactgcaggactcactgattggagtgagtgtcctgagataggggcaattggggatatgcttgcttcttcagattttgcagccactgcttctgtcttg

SEQ ID NO: 484 - DNA, 741 bp, Glycine max
agtcacaggtgtttgcaatactagcgatagctgataagagagataccaacaagaaaagaaaaaaagaagagttgagattccctttgaagaaaagatggcatcccataggcaaagctatgaagctggtcaaactaagggccgaactgaggaaaagacgaaccagacgatgggcaatattggagagaaggctcaagctgcaaaggagaagacccaggaaatggcccaagctgcaaaggagaagacccaacaaacagcccaagctgccaaggacaagacttgcgacacttcccaagcggcaaaggagaagacccaacagaatacaggagctgctcaacaaaagacctcagagatgggccagtccacgaaggaatcggcccagtcagggaaggacaacacccaagggttcctgcagcagacaggggagaaggtgaagggcgcagcccaaggtgctacagaggctgtgaagcaaacccttggcttgggcgagcatgatcaagacaaccgcagaaattactaatactataatttgaagtgctttcttgtagtagtggtttacgcagcatggctttttaaataagctgctattccctacactcctacctaaggagtgtactattatccgcagtttctattctctctagctactttcatgtatgttcaatgctatatatagccttgaattaatgtcaactatgttctaattaatgctatagcttcggtttgtgttactttttaggtgca

SEQ ID NO: 485 - DNA, 1489 bp, Glycine max
atgaacttcaggaactttggtgataataatagtaaccaccccacttgggatgccatgcatgggaagacaccagcaaacaatgttactactctgctgagacagccctcaacaatatactcattgacatttgatgagtttcagagcacaatgggtgggattgggaaggattttgggtcgatgaacatggatgaactcttgaagaacatatgggcagctgaagagactcaagccatggcattttcagctggtgcagcaggaggagaaggccataacaacaaccctattagtggtggtttgcaaagacaaggttctttgacattgccaaggactcttagtcagaaaacagttgatgaggtttggagggacttgatcaaagatagtagtggtggggccaaggatggtggaagtggcaatggtggctcatcaattcctcaaaggcaagcaacattgggagaaatgacattggaggagtttttggcgagagctggggttgtgagagaagatgtgcctcaacaacaacaacaacaacaaattggaaaaccaaacaacaatggatggtttggtgactttcctagaccagacaataacaacactggcctactttttgggtttcaacaaccaaatagaagcaacgggaatttgggtgagaacactaacttagttcccaaacaacctcctcctcctttatcattaaactcaaaccactcccaaagacaagcacaacagcaccaacaacagccaccaccactttttccaaagccagcaaatgtaacttttgcagctgctcctatgcatttgttgaacaatgcacaacttgctagccctggcagaaggagagggttgattggagttgctgagcattcgatgaatgttggaatggttggtttagccacagctaatgtcacagcttctgcctcaagtaaaatatcacctgatgttattacaaggagtaataatgttgataactctccaatatcaccgcattatgtaatcaacaggggaaggaaattcagtgccatagagaaagtggttgagaggagacaaaggagaatgataaaaaatagagaatcagctgcgaggtcaagggctcgtaagcaggcctacactttcgaactagaagctgaggttgcaaaacttaaggaattaaacagagaattacaaagaaaacaggaagaaatcatggaaatgcagaaaaataaggatttggaccctgcatgcagaccaagggtaagtaaaatacactgcttgagaaggacacttactggaccatggtagattatgtgaatgtgagtcattgtttccaagtgacatctacacgaaggaagccattatgtcataagggctggggtatatatatgtatgtgagacgtgaggatgatatacaagaaaacacaaaagctttttcgtgttagtaaacgatgcgtattcgtgttgtaagttttcatagaggttgttgatttatcctaaattaaaaattagagattcttct

SEQ ID NO: 486 - DNA, 1198 bp, Lycopersicon esculentum
atggaggaggagaaacaccaccaccaccacctgttccaccacaaggacaaggcggaggagggccccgtcgactacgaaaaagaaatcaaacaccataaacatctcgagcaaatcggtaaacttggcactgttgctgccggtgcctacgccttggtacgttgatataatcttaccttatatatataacgttattatcgattatttatacaaatcattttcttttattcaaattacgatcaaaatcatttaagagtttttctaccgggaacatccgattagtcaagattttcatcggagagtttgaatatattgattcctaataaaatgattttatttcctcgattcatgccaaaaatctataattaaggacggaagagtagccaattatttatttaatataatttaattccttttttccttttaaatttttagtttaatttcataatatatgtaaggaaggggtgtgaaaaatttaaagaagataaacagagaagggatggttttatttgcgagtaaaagagtttattttctatctaaacacgtttacactaatttcacattaagttcacctaattatagtaactctctatcatctatacaaaaatagcgtaataataaaaattgttctacaacttctaactcttcaattaaaaaaaaaacaacatatagaatatcgatgttgaaattactcagtacttcattcgtttcaaaataagtgttgttgtttgtacgacatgatcacaactgatgaaaatatgtcacacgaattagaacagagtctctgttattaattactttttccctcttttgttggtgataataaacataaaacaaaattagcatgagaaacatgaggcaaagaaagatccagaacatgcacacaaacacaagatagaggaagagatagcagcagctgctgcagttggggcaggtggatttgcattccatgagcatcatgagaaaaaagatgccaagaaagaagaaaaaaaaaagctgaggggggacaccaccatctcttctaaattgttattttagttacatttttaatattcgtggaatttccatatttggtataagtgttgtgtcatcttatcatatatcgtgcataataacaataaatttagtgtgatattataaatggatcgagttaaaaaaaaagagcaaaagtcaaaatatattttaccaatctcgtgtgatg

SEQ ID NO: 487 - DNA, 2875 bp, Arabidopsis thaliana
ggtttctgcagcagcaacaacaaccgagccctgttcgttagggttttcggtttttgttagcttttcttcttcttcttcttcgtttccttccacctgaattgttgtaaccatggcggagaaagtatcggaggacgttatgcttctacacggtgacctcgatttgaaaattgttaaggctaggaggttacctaacatggatatgttctcagaacatttgcgccgtctcttcaccgcctgtaacgcctgtgctagacccaccgataccgatgatgtcgatcccagagataaaggcgaattcggtgataaaaacatccgtagccaccgtaaggttatcaccagcgatccttacgtcaccgtcgtcgttcctcaagcgactctagctcgaacacgtgttttgaaaaactcacaagagcctctttgggacgagaaattcaacatttctatagcgcatccgtttgcttatctcgagttccaggtcaaagacgacgatgttttcggtgctcaaatcattggcacggctaagatcccggttcgagacatcgcatcgggagaacgcatttctggttggtttcctgtactcggtgcttcgggaaaaccgcctaaggcagaaactgctattttcatcgatatgaaatttactccgtttgaccagatccatagctaccgatgtggaatcgccggagatccggagcgtaggggtgttagacggacttatttccctgtgaggaaaggaagtcaggtgaggctttaccaggacgctcatgttatggacggaacgttgccggcgattgggttagataacgggaaagtttatgagcatgggaagtgttgggaagatatatgttatgctatatctgaggctcaccatatgatttacattgttggttggtctatcttccataagattaagcttgttagggaaacaaaagttccaagagataaggatatgacgcttggggaattgctcaaatacaaatcccaggaaggtgttcgagttttgctacttgtatgggatgataagacttctcatgataagtttgggataaaaacgcctggagttatggggacacatgatgaggagactaggaagttcttcaagcattcttctgtgatatgcgttttgtcaccccggtatgccagcagtaagcttgggttgttcaaacaacaggcaagtcctagctcttctatatatatcatgacagttgttggaactctcttcacgcaccatcaaaagtgtgttcttgtagacactcaggctgttggtaataatcgcaaggtcaccgcttttattggaggtctagatctttgtgatggccgttatgacacacctgagcataggatactccacgatcttgacactgtatttaaggatgatttccacaatcctacatttccagctggtaccaaggccccaagacaaccttggcacgatttgcactgtaggatagatgggcctgcggcatatgatgttctcataaactttgagcagcgatggagaaaggcaacacgatggaaggagtttagcttacgtttaaaggggaaaactcactggcaagatgatgctttgatccggatagggcgtatatcatggattctgagtccagtgtttaaatttctgaaggatggtacttcgataattccagaggacgatccatgtgtttgggtttctaaagaagatgatccagagaactggcatgttcagatattccgttctatcgactcaggatccgtgaaaggatttccaaaatatgaagatgaggctgaggcccagcatctggaatgtgccaagcgtcttgttgtagataaaagcatccagactgcatacatccagacaatcagatctgctcagcatttcatatatatcgagaatcagtatttcctgggttcttcttatgcttggccttcttatagagacgcaggagctgacaatcttattcctatggagttggcactaaagattgttagcaaaatcagagctaaggaaagatttgccgtatatgttgtcataccattgtggcctgaaggcgacccaaagtctggccctgtgcaagaaattctatattggcagagccaaactatgcagatgatgtatgatgttatagcaaaagaactgaaagcggtgcaatcagatgctcatcctctcgattaccttaacttttactgccttggtaaacgagagcagcttccagatgatatgccagccaccaatggcagtgtggtatcagattcttataatttccagcgtttcatgatttacgtgcacgcaaaagggatgatagtagatgatgagtatgtactcatgggatctgctaatatcaaccaaagatctatggcaggcaccaaagatactgaaatcgccatgggcgcataccaacctaatcatacatgggctcacaagggaagacacccacgtggccaggtgtatggatacagaatgtcactatgggcagagcatttaggcaaaactggagatgagtttgtggagccatcagatctggaatgtctgaagaaggtgaacacaatctctgaagaaaactggaaaagattcatagacccgaaattctcagagctacaaggtcacttaataaagtatcctctacaagtagacgttgatggtaaagtaagccctcttcctgattacgagaccttcccagatgttggtggtaagatcattggagctcattccatggctcttcctgacactttaaccacgtaatgtgaatgttcaatgtaaatttcagcatttgttttggggtttcttttgatcctgaataatattagctgaaagtgttgtttgagttgttgtacatttaactgtgttgtttcttttttatacattcttttgtgattgtcgtcaaaaaaaaaaaaaaaaaaa

SEQ ID NO: 488 - DNA, 2897 bp, Glycine max
gcattcccacaaacacgaagcgaatagattgcaatattatgcaataatgtgaaaaaagttgaaatatgcatgcttttcatttttcaatcttcccttgttaaaaggagagactcactcacttccattgtcactgctcctttctcggatctctctcttcttcttcttcgttttctcttcgcgagtgagagatggcgcaaattctgcttcatgggactctccatgccaccatcttcgaggttgataggctcaatgctggtggtggtggcggcaattttttcagcaagctcaagcaaaactttgaggagactgttggtattggaaagggagttactaaactctatgcaaccattgatctggagaaagcaagagtaggaaggactagaatcatagaaaatgaacatactaatcccagatggtatgagtcttttcacatttactgtgcccatatggcttcaaatattgtattcactgtgaaagatgataatcctattggggcaactttaattggaagagcttatgtgcctgtttcggaggtcttggatggtgaggaaatagacaggtgggttgaaatattggatgaggaaaaaaacccaatacatgagggttcaaagatccatgtgaagctgcaatattttgatgtcacaaaagaccgcaactgggctcgaggcattagaagtcctaaatttcctggagttccctatactttcttctcacagaggcaaggatgtaaggtatctctgtaccaagatgctcatgtgcctgataattttgtacctaaaatacctcttgctggaggcaagaattatgaggctcataggtgttgggaggatatatttgatgcaatcactgatgctaaacacttcatatacattactggttggtctgtttatactgaaatttccttggtaagggattctaggaggcctaagcctgggggagaccaaacacttggtgagcttctcaagaaaaaggcaagtgaaggtgttaaggtattgatgcttgtttgggatgatagaacatcagttggtttgttgaaaaaagatggactgatggctactcacgatgaagaaactgcacagttctttgatggcactgaggtgcattgtgttttatgcccccgcaatcctgatgatggtggtagcattgttcaggatttacaaatttctaccatgtttactcatcaccagaagattgtggtggttgacggtgcgatgccaggtggagggtcagataggcgaagaattgtgagttttgttgggggtattgacctctgtgatggaagatacgacactgccttccactcactgttcagaaccctggacacagcacaccatgatgattttcatcagcctaactttcctggtgctgtaatcacaaaaggtggtcccagggaaccttggcatgacattcactcccggcttgaaggacccatagcttgggatgttttgttcaactttgagcaaagatggagaaagcaaggtgggaaggatgtacttgttccattgagagagcttgaagatgtcattatctccccatccccagtaacatttcttgaagatcatgagacatggaatgttcagttgtttagatctattgatggtggggctgcttttgggttcccagagactcctgaagatgctgccagagctggtcttattagtgggaaggataatatcattgatcgtagtattcaagatgcttatattaatgctattcgacgtgcaaagaacttcatctatattgaaaatcagtatttccttggaagctcttttgcctggagtgctgatgatattaagcctgcagacattggtgctttgcatctaatcccaaaggaactttcactcaagattgttagcaagattgaagctggggaaaggtttgctgtgtatgttgtagtcccaatgtggccagagggtgtcccagaaagtgcatcagttcaggcaatattggactggcagaagagaacaatggagatgatgtacagggacattattcaggcactcagagctaagggaatcgaggaagatcctcgaaactatctgacattcttctgccttggcaaccgggaagtgaagaaaccaggagaatatgagccttctgaacaaccagatcccgattcagattatcagagagcccaagaggcccgacgattcatgatttatgttcataccaagatgatgatagttgatgacgaatacataatcgttggatctgccaacatcaaccaaaggtcaatggatggtgctagggactctgagattgccatgggtgcttatcagccctatcatttggctaccaggcagccggcacgtggccagatccatggtttccgcatgtcattgtggtatgagcaccttggcatgcttcatgactccttcctccagccagaaagtgaagaatgcattaataaggtgaaccaagttgctgacaaatattgggatctgtattctagtgagtcacttgagcatgaccttcctggtcaccttctccgctaccccatcgggattgccagtgaaggagatgtcactgagctgccaggatttgaattcttccccgacaccaaggctcgcattcttggtggcaaagctgactacctcccccctatcctcactacttagtttgattttgtactttgttacaaacttgtgattgcttacatcctaatttgtgtttttattactacttagtaataatcttaatatagtctgtgatgtcttgtggagatttttttttcttctatttttttgaagatgtcagtgacagattttagttatctgatggctttgactggtttctaatcaatgtttccttttctctcacaatgttactgttgtttttctacctattttctggtttgaattattctgagcaagcctacctgggtttagcttaatgcc

SEQ ID NO: 489 - DNA, 3176 bp, Arabidopsis thaliana
cttttaaagtatatctaaaaacgcagtcgttttaagactgtgtgtgagaaatggctctgtttagagatattgttcttcttgggtttctcttctgcttgagcttagtagctactgtgacttcagaggagggagcaacgttgctggagattaagaagtcattcaaagatgtgaacaatgttctttatgactggacaacttcaccttcttcggattattgtgtctggagaggtgtgtcttgtgaaaatgtcaccttcaatgttgttgctcttaatttgtcagatttgaatcttgatggagaaatctcacctgctattggagatctcaagagtctcttgtcaattgatctgcgaggtaatcgcttgtctggacaaatccctgatgagattggtgactgttcttctttgcaaaacttagacttatccttcaatgaattaagtggtgacataccgttttcgatttcgaagttgaagcaacttgagcagctgattctgaagaataaccaattgataggaccgatcccttcaacactttcacagattccaaacctgaaaattctggacttggcacagaataaactcagtggtgagataccaagacttatttactggaatgaagttcttcagtatcttgggttgcgaggaaacaacttagtcggtaacatttctccagatttgtgtcaactgactggtctttggtattttgacgtaagaaacaacagtttgactggtagtatacctgagacgataggaaattgcactgccttccaggttttggacttgtcctacaatcagctaactggtgagatcccttttgacatcggcttcctgcaagttgcaacattatcattgcaaggcaatcaactctctgggaagattccatcagtgattggtctcatgcaagcccttgcagtcttagatctaagtggcaacttgttgagtggatctattcctccgattctcggaaatcttactttcaccgagaaattgtatttgcacagtaacaagctgactggttcaattccacctgagcttggaaacatgtcaaaactccattacctggaactcaatgataatcatctcacgggtcatataccaccagagcttgggaagcttactgacttgtttgatctgaatgtggccaacaatgatctggaaggacctatacctgatcatctgagctcttgcacaaatctaaacagcttaaatgttcatgggaacaagtttagtggcactataccccgagcatttcaaaagctagaaagtatgacttaccttaatctgtccagcaacaatatcaaaggtccaatcccggttgagctatctcgtatcggtaacttagatacattggatctttccaacaacaagataaatggaatcattccttcttcccttggtgatttggagcatcttctcaagatgaacttgagtagaaatcatataactggtgtagttccaggcgactttggaaatctaagaagcatcatggaaatagatctttcaaataatgatatctctggcccaattccagaagagcttaaccaattacagaacataattttgctgagactggaaaataataacctgactggtaatgttggttcattagccaactgtctcagtctcactgtattgaatgtatctcataacaacctcgtaggtgatatccctaagaacaataacttctcaagattttcaccagacagcttcattggcaatcctggtctttgcggtagttggctaaactcaccgtgtcatgattctcgtcgaactgtacgagtgtcaatctctagagcagctattcttggaatagctattgggggacttgtgatccttctcatggtcttaatagcagcttgccgaccgcataatcctcctccttttcttgatggatcacttgacaaaccagtaacttattcgacaccgaagctcgtcatccttcatatgaacatggcactccacgtttacgaggatatcatgagaatgacagagaatctaagtgagaagtatatcattgggcacggagcatcaagcactgtatacaaatgtgttttgaagaattgtaaaccggttgcgattaagcggctttactctcacaacccacagtcaatgaaacagtttgaaacagaactcgagatgctaagtagcatcaagcacagaaatcttgtgagcctacaagcttattccctctctcacttggggagtcttctgttctatgactatttggaaaatggtagcctctgggatcttcttcatggccctacgaagaaaaagactcttgattgggacacacggcttaagatagcatatggtgcagcacaaggtttagcttatctacaccatgactgtagtccaaggatcattcacagagacgtgaagtcgtccaacattctcttggacaaagacttagaggctcgtttgacagattttggaatagcgaaaagcttgtgtgtgtcaaagtcacatacttcaacttacgtgatgggcacgataggttacatagaccccgagtatgctcgcacttcacggctcactgagaaatccgatgtctacagttatggaatagtccttcttgagctgttaacccgaaggaaagccgttgatgacgaatccaatctccaccatctgataatgtcaaagacggggaacaatgaagtgatggaaatggcagatccagacatcacatcgacgtgtaaagatctcggtgtggtgaagaaagttttccaactggcactcctatgcaccaaaagacagccgaatgatcgacccacaatgcaccaggtgactcgtgttctcggcagttttatgctatcggaacaaccacctgctgcgactgacacgtcagcgacgctggctggttcgtgctacgtcgatgagtatgcaaatctcaagactcctcattctgtcaattgctcttccatgagtgcttctgatgctcaactgtttcttcggtttggacaagttatttctcagaacagtgagtagtttttcgttaggaggagaatctttaaaacggtatcttttcgttgcgttaagctgttagaaaaattaatgtctcatgtaaagtattatgcactgccttattattattagacaagtgtgtggtgtgaatatgtcttcagactggcacttagacttccaaaaaaaaaaaaaaaaaaaaaaaaaaaaaaaaaaaaaaaa

SEQ ID NO: 490 - DNA, 900 bp, Glycine max
atggcatcagagcttgaattgcccccaggcttcagattccatccaacggacgaggagctggtgttgcactatctctgccgcaaatgcgcgtcgcagccaatcgccgttcccatcatcgccgaaatcgacctctacaaatacgacccctgggacttacccggattggctacttatggagagaaagagtggtacttcttttcaccacgggaccggaaatacccaaacggttcgaggccgaaccgggcggctggcaccggttactggaaggcaaccggggcggataagcccattggtcagcccaaaccggttgggattaaaaaagctttggtgttttacgcagggaaagctcctaaaggggacaaaagcaattggatcatgcacgagtatcgtctcgcagacgtagatcgctccgttcgcaaaaagaacaccctaaggttggatgattgggtgctttgccgtatttacaacaagaagggcacgatcgagaaactgcaaccaagcagcgatgttgctcatagccgaaatatcgaatcctcggagatcgaagacaggaagccggagattctgaaaagcggaggaggttgtcttccgccgcctgtgccggtgcctgcgccgccgcaagcgacggcgaagacggattacatgtacttcgacccgtcggattcaatcccgaagctgcacacggactcgagctgttcggagcaggtggtatcgccggaattcgcgagcgaggtgcaaagcgagcccaagtggaacgagtgggagaaaagcctcgaatttccatttaattacgtggatgccactctcaacaacagcttcatggcccaattccagggcaataatcagatgttgtcgccgctgcaggacatgttcatgtactggcccaacaagtccttttga

SEQ ID NO: 491 - DNA, 1014 bp, Glycine max
atgggagttccagagagagaccctcttgcacaattgagtttgcctcctgggtttaggttttaccccacagatgaggagcttttggttcagtacctttgccgcaaggttgctggccatcatttctctcttccaatcattgctgaagttgatttgtacaagtttgatccatgggttcttccaggtaaggcagtgtttggagagaaggagtggtacttttttagcccaagagacaggaagtacccgaatggttcacgaccaaacagagtcgcgggttctgggtattggaaagcaactggaacagacaagatcatcaccactgaaggtagaaaagttggcataaaaaaagcacttgttttctacattggcaaagcacccaaaggctccaaaaccaattggatcatgcacgagtatcgccttctcgattcttcccgcaaacacaacctcggaaccgcaaagcttgatgattgggttctatgtcgtatctataagaagaactcaagttcacaaaaggttgaggctaattttttggctatggaatgcagcaatgggtcatcaccttcttcatcgtcccacgtggatgacatgctgggatcgttgccggagataaatgaccggtgcttcaccctgccacgagtgaactcactcagaacaatgcaccagcaggatgagaaattcgggtctccgaacatgggatccgggtttttctcggattgggttaactcgaccgatctcgattcgatttccgaattcgagtcgggttgccaaacccaaagaatggtgaattatgattgcaatgacttttttgttccttctctgccgcccttgggccatgtggactacatggtggatgcacctttggaggaggaggttcaaagtggtgtgagaacccgacgggtcgacgggccggggcattttcaaccgaatccagatacccgattgttaccgggctcaggtgacccattcgggtttgggtttattatgggtcagcaagttgggttcggggttagggagtga

SEQ ID NO: 492 - DNA, 1038 bp, Glycine max
atgggagttccagagaaagaccctctttcccaattgagtttgcctcctggttttcggttttaccccaccgacgaggagctcctcgttcagtatctatgccgcaaggtcgctggccaccatttctctcttccaatcattgctgaaattgatttgtacaagttcgacccatgggttcttccaagtaaggcgattttcggtgagaaagagtggtactttttcagccctagagacaggaaataccctaacgggtcccgacccaacagagtagccgggtcgggttattggaaagccaccggaaccgacaagatcatcaccaccgaaggtagaaaagttggcataaaaaaagccctcgttttctacattggcaaagcccccaaaggcaccaaaaccaattggatcatgcacgagtatcgcctcctcgactcttcccgaaaaaacaccggcaccaagcttgatgactgggttctgtgtcgtatctacaagaagaactcgagtgcacagaaggcggtgcaaaacggcgtcgttccgagcaacgagcacactcaatacagcaacggttcctcttcctcttcttcgtcacaactcgacgacgttctggaatcgctgccagcgattgatgaacggtgtttcccgatgccacgtgtcaacacgctgcagcaacagcagcacgaggagaaggtcaatgttcagaacttgggtgaaggggggttactggattggaccaacccttcggttctgaattcggtcgttgatttcgtatcggggaataataatcataatcaattggtgcaggaccagacgcaaggcatggtgaactacaacgcgtgcaatgacctctatgtccctacgttatgccatgtgggcacgtcagttccgcaaaagatggaggaagaggtgcaaagcggcgtgagaaaccaacgggtccagaacaattcctggtttcttcagaatgatttcacacaggggtttcagaattcggttgacacgtctgggtttaagtacccggttcaaccggtggggttcgggttcaggaattga

SEQ ID NO: 493 - DNA, 1074 bp, Glycine max
atggaaaacgtttcggttcttttgtgtaataaggaaaaggatcagatggatttgcctcctgggtttaggtttcacccaacagatgaagagcttattagtcattacctttacagaaaggtcactgacaccaacttctcagctagagccattggagaggtggacttgaacaggtctgagccttgggatttgccatggaaggccaaaatgggagagaaagagtggtactttttctgtgtgagggacagaaaatacccaactggtttgaggactaatagagccactgaatcaggatactggaaggctacagggaaagacaaagagattttcagagggaaatctcttgtgggtatgaagaaaactttggttttctacaaaggaagggctcccaagggagagaaaactgattgggtcatgcatgagtataggcttgatggtaaattctctgttcacaacctccccaaaactgcaaagaatgagtgggtgatttgcagggtttttcagaagagttcaggtgtgaaaaggactcatatttctgggatgatgatgttggactcttatggaaacgaaatggtttattcttcttctgctttgccacctctcactgattcctcaccttccattggcaacaacaccaaagcactgagtgtgactgattctgcttacgtgccctgcttctccaatccaattgatgttcctagaggaatctttgattccttgaacaacatcaatatcagcatcaacagcaacaccctttatggagtttcttcaaaccattcattttacaatactcagggggttcaacttcaggctccaccaactttgccattacctagttcttcaaaccattaccttagagcctttcttgaaaaccaaggaaatggatcgaacatgagcaacaatggttttgagccagagagggaaatggtcagtgtctcacagaaaacaagtctttctactgatgtgaaggctgaaatctcttcattgggtaaaaggcactttgagaatcaaaacaacccaattgcttcagcagctgcagttgcaccaatggaccttgctaccttgtggaactactga

SEQ ID NO: 494 - DNA, 843 bp, Glycine max; identical to SEQ ID NO: 338

SEQ ID NO: 495 - DNA, 807 bp, Glycine max
atggccgcagcaacacaactccacttaccccctggattccgattccaccccaccgatgaagaactcgtcgttcactatctctgccgcaaatgcgcttcgcaagaaatcgcagttccaataatcgccgaaatcgatctctacaagtacgacccatgggaccttccaggaatggctttgtacggagagaaagagtggtattttttcacgccgagggaccgcaagtacccgaacggttcgcggccgaaccggtccgcggggaccggatactggaaggcaaccggagcggataaaccggttggcaaaccgaaacctgttgggatcaagaaagcattggttttttacgccggaaaagcgcccaagggagtgaaaactaactggatcatgcacgagtatcgtctcgccgacgtggatcgttcggttcgcaaaaagaacagcttaaggctggatgactgggtgctgtgtcgaatttacaacaagaaaggtgcaattgagaagcagcaaccagcaccgccaccaccgagtggtgtccacaaaattgaatgttacgaaatggaagacgtgaagccggagtatacggcggcggattgcctgtacttcgaggcttccgactcggtgccgcggctgcacacgacggagtcgagctgttcggagcaggtggtgtcggcggagtttgcgagcgaggtgcagagcgagcggaagaggcagggcaacagcgagttttcgtataattacatggatgccactctcgggaataatcagatgtcgccgctccaggatatcttcatgtacctctccaggcccttctga

SEQ ID NO: 496 - DNA, 606 bp, Glycine max
atggaagatggaagcgtcaaccttcctcctgggtttttcttctctcctactgatgaagaacttgttcttcactttctctattgcaaggcttctctcattccatgccatcctaacatcatccccgatctccatccgtctcagcttgctccttgggaattaaatggtaaggcgttgttaagtggaaatcagtactatttctttaccaaagtgaatgaaaacagagccagagaaaatgggtattggaaggacacaggtgtcacggaacctatattgtcaacctttgataagaaagtgggaatgaagaagtacttggtgttccacataggtgaagctccacaaggtactgaaaccagttgggtaatgcaagaatattatatatgttcctctgggtttgacactgcctcatatcgaagtgctaggagaagaagaaaacatgatcaaagttggagcaagtgggttttgtgcaaagtctatgagaagatcaggtctcaacaaggtgtaaactgctatagcgatgatgatgacagtggatcagagctttcttggctagacgaagtttatctgtcgttggatgatgatctggaagaaattggcatgcctatttag

SEQ ID NO: 497 - DNA, 969 bp, Glycine max
atgacatggtgcaatgactctgatgaggatagggttattgaatcaacgacgccaacaataactattactcctaacactgatggcataaagctcaccgaagaaattagaaccataacatgcccctcgtgcggccataacattgaattcaaagatcagggtggaatccatgacttgccggggttaccagctggagtgaagtttgacccaaatgaccaagaaatattagaacatttggaggcaaaagtggcgtctgatgcatgcaagcttcatccccttattgacgagttcataccaacgcttgaaggcgaaaatgggatctgttatacacacccagaaaagctaccaggtgttagcaaagatggacagatccgccacttctttcacaggccctcaaaagcatacacaactggaacgaggaaaagaagaaaagttcacactgatgatgaaggaagtgaaacaagatggcacaaaacgggaaaaactagagcagtttttgcagcagccggtggtgcagtaaaaggttttaagaaaatactagtactctacaccaactatggaagacaaaagaagcctgagaaaactaattgggtgatgcatcaataccatcttggcagtactgaagaagagaaagatggagaattagttgtttcaaaggtcttctatcagacacaacctagacaatgtggcaatcccattataataaaggattcatacgaaaaaatgttgaatgatggaagtggccaagacaacattaatatatcattaatacctaaaactactgcaactcttttggattgctacactgctccttacatagattatgatcacgtccatgtgagtcataacagggaaagttcctcacaactaattattcccagctcggttgttcaagttgatggctcttatattcgcttaacaatggatgcaaagaaagcaagatttgaaagtaacactgggaagagattctag

SEQ ID NO: 498 - DNA, 1197 bp, Glycine max
atggggaagaagaagaagagagtttcctcgaaggtgtggtgttattactgcgatcgcgaattcgacgacgagaagatcttggtgcagcatcagaaagccaagcactttaagtgccatgtctgccacaagaagctctctaccgctggcggcatggccatccacgtcctccaggtccacaaggaatccgtcaccaaggtacccaacgcaaaacctggcagagagagtacggatattgaaatatatggaatgcaagggattccaccagatatcttggctgctcattacggtgaagaagaggatgatgttccgtcaaaggcagccaaggtggatattccaccaactcagcttgtaggtggaatgattccacctcctttgggtacaggatatcctccgcgaccaaccttgcccacaatgccaccaatgtataatcctgctgtacctgtgcctccaaatgcttggatggttccacctcgacctcagccatggttttcacagcctccagctgtttcagttcctcctgctgccccatacacacagcagccattatttcctgtgcagaacgtgaggcctccactgccagctactgctcctgcgctccaaactcagattactcctcctggattgcctacatctgcacctgtcccagtttcacaacctttatttcctgttgttggaaataaccatacaactactcaaagttcaacattttctgctccacctctgccctcaagtgttccatcagttacttcagtgatgtctgcaaatgttcctgttgatacacatttgagcagcaattcttctgtaacaagtagttatcaggctatagggattccaggtggagcagctagtaactcacattcttatgcttctggtccaaatactggtggtccttcaattgggcctcccccagtaattgcaaacaaagctcctgctactcagcctgccaccaacgaagtctacttagtttgggatgatgaggcaatgtccatggaggaaagaagaatgtctttgccaaaatatcaggtgcatgatgaaagtagccaggtaagtcatactacctctttaatagatggagttgctttcacatctaaccagatgagtataggctttatgcttcctgttttcagattcagttgtttacacattgtttcctatttaaagaggtacattctgtataaatttttaattcttttttaa

SEQ ID NO: 499 - DNA, 969 bp, Glycine max
atgggagaggaaacaactgagagtgagaaggaagatggagtgaccaatcttgatactgtctcaagaccaggggaagtgtctattaacccctctaccaagaaggaggatcttacattgaaaacttcaaaaaagaccgaacaagaacaaggtgaaaattcccaagataaaacactgagaaagccggacaaaatactgccttgcccccgctgcaatagcatggataccaagttctgctactacaataattacaatgtcaaccaaccccgccatttctgcaagaattgtcagagatactggactgccggtggagtgatgaggaatgttcctgtgggtgctggtcgcaggaagaacaagaattttacttctcagtatcgtcagataactgttcctgaagcagcactcttgagttctcagccggacttgccaaatggtccttccttgaactgtaatgccacactccttgcatttgggtctgatacacccttgtgtgaatcaatgacatctgttttgaaccttgctgaaaaagcagtgaacaattccacaacaaatggatttaatggctcagaagaactagaaattccttttgcttatgttgctggagaaaaagtgaatgatgattccaataaatcttctgacatgtcaacaaagccaatggaaggtgaaaccaccaataggtcccaagaacaagtcatagagaattgtcatcccttcccacctcatgctccctactttcctggtgccccttggcctttcccatggaatccagcactgtggaactccccggtaccatcaccacctgcttttttcccacaaggatttaccatgcctctctatcctgcagcagcttattggggtcttactataccgggtgcatggagcatcccatggctagcgcaaccatcattaccaaatagcacagtgtctaactctggtccagaccccattgcccgaaccatagccatgtcttga

SEQ ID NO: 500 - DNA, 671 bp, Glycine max
cagattctcaacataccttacaatcagacccttaaaccatcatcttgaaaaatagttctaaatttcccaccatggttcctagtgagatcagaggagtccactatctagcacctgaaaatccattcctagttccaccaaactttagccttctgcaaagtgacatccctaatctccatcttaacaccctcctaagcaactttccaaactgccacttccctccttcaggccatgaatttgttgttcctccctcttcatgcctcagcagcaactcaacctctgatgaagctgatgaaatccagttcaacatcatcgacgaaaggaagcaccggagaatgatatcgaaccgagaatccgctcgcaggtcaaggatgaggaagcagaagcacctggatgagctgtggtcacaggttgttaggctcagaactgagaaccacaaccttattgacaaactcaaccatgtgtctgaatcccatgacagagtcctccaagagaatgcacgcctcaaggaagaagcttccgctcttcgccaaatgctagcagacatgcaaattggaaccgcttttgcttgcaccatggaagatttggaggaccttccatgcaacacttctcaactcaaacctgatcccttaaaccaatcaatcactcctgcagacatgattcatgaatgaggc

SEQ ID NO: 501 - DNA, 1764 bp, Arabidopsis thaliana
atggatttgttcaagatccttcttcttgtgttcttcgtgaacataagtttctgcttcgctgcagatccatattctttctataacttcgaagtctcttacattactgcttctcctcttggtgtccctcaacaggtcattgctataaatggaaagtttcctggtcctacaatcaatgttacaaccaatgaaaatctggttgttaatgtcagaaacaagttagacgagggacttcttcttcattggaatggaatccaacagagacgtgtgtcatggcaagatggagttttaggaaccaattgtccaatcccaccaaagtggaattggacttatgagtttcaagttaaagaccaaattggtagtttcttctactttccatctctacatttccagagagcttctggtggttttggctcctttgttgtcaatcctagagctattattccagtccctttctctactccagacggtgatattaccgttaccattggtgattggtacataaggaaccacacggctttgaggaaggctttggatgatggtaaagatcttggaatgcctgatggagttctcattaatggaaaaggaccttaccgatacaatgacacgcttgttgctgatgggatcgatttcgaaacaatcacagtccatcctggaaaaacttatagacttcgagtgtcgaatgtgggaatctcgacgagtttgaactttaggattcaaggtcacaacttagttcttgcggaatcagaaggatcatacacagttcaacaaaactatacaagcttggatattcatgttggacagtcttattctttcttggttacaatggatcaaaacgcgagctctgattactacattgtcgcgagtgctcgggttgttaacgaaaccatatggagaagagtcactggagttggaatcttgaagtataccaactctaaaggaaaagctaaaggtcagttaccccctggaccacaagacgaattcgacaaaactttctccatgaatcaagcaagatccatcagatggaatgtatcagcaagtggtgcacgtcctaacccgcaaggatcatttaaatacggttcgatcaatgtaaccgatgtctacgttctaaggaacatgccgcctgtgacgattagtgggaagagaagaacaacgcttaatggcatatcgttcaagaatccttcaacacctattagactagctgataagcttaaagttaaagatgtgtataagcttgatttccctaagagacctttaactggaccagctaaagtggcgacttcgattatcaatggtacttatcgtggattcatggaagtcgttcttcagaacaatgacactaagatgcaaagctatcacatgagtggctacgccttctttgtcgtcggtatggattatggagagtggacagagaacagtagaggaacatacaacaaatgggatggtatcgcgcgttccactattcaggtgtatccaggggcatggtcagcgatattgatatcattagacaatcctggagcttggaatctaagaacagagaatcttgattcgtggtatcttggacaagaaacttacgttagagtggttaatccagacgaaaacaacaaaaccgaattcggacaccctgacaatgttctttactgtggtgctctcagcaaactacaaaagccacagaaggtttcatcgtcggcatcgaagagcattggattcacgagtctttctatggtggtaatggctttggtgatgatgatgatgcttcagcattga

SEQ ID NO: 502 - DNA, 1324 bp, Glycine max
gatcaaaaaatgactaacattcgaaattgagatctaccacgatgctgactctttcacacagtccaaatcaggcatttccatgtgatctctagaggttgaaaaaatcaatgcgaggtcgacaggaaatcctcgcctccctcgcatgatgttcctgagtttcaacatgattagcggcggcaacacactccaaaggtttgaccctgtcgcttgcgtttcttctgtccctcttctcctcgcacccaccacacgacctactttccattttccttccccttttctctccaaacccaaacccacttacctcttcacttctttttcttcttcttcttcttcttcttcttcctttttctcttccaccacgccaccgcgatccaccatgctgcaccacgaccctcttgtctctgacgtctacgccaccgccatttccggcgtcgttgccctgtccttcctcagattgttccaagaaactgcaaaacgagacctcttcgaccagaaattaaataggaaacttgtacatataagtattgggctgatattcatgctctgctsgccgctattcagtactgaaacttgggcatctttctttgctgctctcattccgggaatcaatatatttcggatgcttgttattggacttggaatattgaaagatgaggccacagtgaaatcaatgagcagatttggagattacagggaacttcttaaaggaccactgtattatgccgcaactattactttggcagccataatatactggagaacttcacctatttccattgctgcaatatgtaatctgtgtgcaggagatggcatggctgacattgttggaaggcgacttggcggtgaaaagataccttacaacaaaaacaagtccttcgctggttcaattgcaatggcaactgctggattcttaacttccattgggtatatgtggtatttttcctcatttggatttattgagggaagctggaaattggttctaggttttctgttagtgtctattgtgacagcatttgtcgagtccctgcctatcagcacagagcttgatgacaacctcacagttcccctcacttccatattggtgggcagtatcattctttgatatgaagcatattgcagtaaaacaaatcagacactaggaatcagttctctacatctttcaatctagttagaaaatgtttattatgcatctagttaaagtagtcttttttgttggcagaaaaattgactgatgtttgtagtgtatgctctcgatcaatatggaaacagaacaatttgcagtcttgtgttctttctattggatgaatgctcacaatttttgttc

SEQ ID NO: 503 - DNA, 1380 bp, Arabidopsis thaliana
atgttgaaaatcaaaagagttccgaccgttgtttcgaactaccagaaggacgatggagcggaggatcccgtcggctgtggacggaattgcctcggcgcttgttgccttaacggtacgttttggaaacctgaatcgtcttttttaatcatgcttccattgtatgcatgtaagaatctggtaaaatccggagagaagcttgtaatcagtcatgaggctatagagcctcctgtagcttttctcgagtcccttgttctcggagagtgggaggataggttccaaagaggactttttcgctatgatgtcactgcctgcgaaaccaaagttatcccggggaagtatggtttcgttgctcagcttaacgagggtcgtcacttgaagaagaggccaactgagttccgtgtagataaggtgttgcagtcttttgatggcagcaaattcaacttcactaaagttggccaagaagagttgctcttccagtttgaagctggtgaagatgcccaagttcagttcttcccttgcatgcctattgaccctgagaattctcccagtgttgttgccatcaatgtaaagactcttgtgcagagagcttgtccgatagagtatggccatgtgctgctgattcctcgtgttcttgactgcttgcctcaaaggatcgatcacaaaagccttttgcttgcagttcacatggctgctgaggctgctaatccatacttcagactcgattacaacagcttgggtgcttttgccactatcaatcatctccactttcaggcttattacttggccatgcctttcccactggagaaagctcctaccaagaagataactaccactgttagtggtgtcaaaatctcagagcttctaagttaccctgtgagaagtcttctctttgaaggtggaagctctatgcaagaactatctgatactgtttcagactgctgtgtttgccttcaaaacaacaacattcctttcaacattctcatctctgattgtggaaggcagatcttcttaatgccacagtgttacgcagagaaacaggctctaggtgaagtgagcccggaggtattggaaacacaagtgaacccagccgtgtgggagataagtggtcacatggtactgaagaggaaagaggattacgaaggtgcttcagaggataacgcgtggaggctccttgcggaagcttctctgtcggaggaaaggtttaaggaggttactgctctcgcctttgaagccataggttgtagtaaccaagaggaggatcttgaaggaaccatagttcatcagcaaaactctagtggcaatgttaaccagaaaagcaacagaacccatggaggtccgatcacaaatgggacggccgccgagtgccttgtccttcagtga

SEQ ID NO: 504 - DNA, 1360 bp, Glycine max
atggttcaccataggaaagtgttgaaacaaataaaggatatggcactgaagttttcaggtgcatacaagcaatgcaaaccctgcacagggtccagtagctataagaaagaacataggccatatccagattttgatactatctcagaaggggttccatacccttatattggaggtgcaagctcaagttcaacacctgcatgggacttcacaacctctcactaccctggtggaagatctgaccctagatttgctggggcatttggcggtgaccgcacgccgagagcacgtgactcaacatcagtttgtgatgtagtcttagaggatgaggatgagcctaaggagtggatggcacaggtggagccaggggttcacattacctttgtgtctcttcctaatggaggaaatgatcttaagagaattcgcttcagccgagagatgtttaataaatggcaagctcaaagatggtggggtgagaattacgacagaatcatggaactttacaacgtccagagatttaataaacaagctcttaacactccttcaaggtctgaggatgagcaaagagattcttcttactcaagattgacatctgcaagggaaagccccatggcctcaaacaaggattggacgccgaggagtcattataagccctcagggagcagaggatattacccgtctgaaccgttggatcacggtggaggtggtggccaataccatgcagggccatctatggaaccagcaagggataccactgcttctagagatgagccttctatcagcaatgccagtgaaatggagacagaatgggtagaacaagacgagccaggagtttacattacaatcaggcagttagctgatggaacaagagagcttagacgtgtcagattcagccgggaaagatttggggaggtgaatgcaaaaacttggtgggaagagaacagagagagaatacaagctcaatatctttgaactttgaagtcacattttcctaacaaaaagtggatctcctaaactggtggaatccccaaaattttgtttcctagagaatgtaatggtatgactccagattatggagtggagtcagttcctatacagaaaagaaaacttgacttttcccaccatcggttatggtctctggtgttaaattgacagtcacatacaagatagtgtgcaaatcagggatttagtagttttgtggtgacactccatttttgccaaggatcagtcgccattggattgggaggtctaatctttataattgcatatcatcacatatatattttttatcctcctaatttttctagtcttgctttcttttcgttttgagggatacttttttgtcatcatagttgctgttaca

SEQ ID NO: 505 - protein, 485 aa, Arabidopsis thaliana
MSDFDENFIEMTSYWAPPSSPSPRTILAMLEQTDNGLNPISEIFPQESLPRDHTDQSGQRSGLRERLAARVGFNLPTLNTEENMSPLDAFFRSSNVPNSPVVAISPGFSPSALLHTPNMVSDSSQIIPPSSATNYGPLEMVETSGEDNAAMMMFNNDLPYQPYNVDLPSLEVFDDIATEESFYIPSYEPHVDPIGTPLVTSFESELVDDAHTDIISIEDSESEDGNKDDDDEDFQYEDEDEDQYDQDQDVDEDEEEEKDEDNVALDDPQPPPPKRRRYEVSNMIGATRTSKTQRIILQMESDEDNPNDGYRWRKYGQKVVKGNPNPRSYFKCTNIECRVKKHVERGADNIKLVVTTYDGIHNHPSPPARRSNSSSRNRSAGATIPQNQNDRTSRLGRAPPTPTPPTPPPSSYTPEEMRPFSSLATEIDLTEVYMTGISMLPNIPVYENSGFMYQNDEPTMNAMPDGSDVYDGIMERLYFKFGVDM

SEQ ID NO: 506 - DNA, 720 bp, Glycine max
acatagcatagctttgaatacaaaaccaagttaatgttgcaatcgcataataataaccatccaaagtttattgagagaaatttgcaagtttgaaaagaaacatggcatctcatcaacaaaacaagcaagagcttgatgaaagggcaaggcaaggagagactgttgttccgggtggcactggtggcaagagccttgaggctcagcaacatcttgctgaaggaaggagcaggggagggaaaacaaggaaggagcagctggggacagaagggtaccatgaaatgggacgcaaaggtgggttgagcactatggacaagtcaggagaagaacgtgctcaagaggaagccattgacatcgatgagtccaagttcaggactggtaataaccaagacaagaaccagaacaagtgatcatgcaacacccttcactatcatatgtagtgtgttcttatgctagcttaaatgctagtgtcttagtgttttaggaaaggataggttataaaaatggtataggtagcagctaggtcaaagtgtcatgtcattgtgtcgtgaaattattagctagcatgtttagtgttttagggtttcttttgcatgtgtgtttctcttatggggtgtaactgatgagtgaggcatggctctactatagctatctaaaaaataatgcaagcttttttttatctcttgttcttgtaatatatttatcgtgcctccatttcactat

SEQ ID NO: 507 - DNA, 1089 bp, Glycine max
gcacgagcttcaacctctcatcattaggcattcagcaagcaagaaaaaaaaatgggcaaaatcatgcttgttttgggtagcctcattggattatgctgtttcacaatcactacctatgccttctcaccttctggatggaccaacgcccatgccactttttatgggggtagtgatgcttcaggaactatggggggagcttgtgggtatgggaatctgtatgcaactgggtatggaactagaactgcagctttaagcactgccttatttaatgatggagcttcctgtggtcagtgctacaaaattatatgtgattacaaatcagactctagatggtgcatcaaaggaagatctgtaaccgtaactgccacaaacttttgccctcccaatttcgcccttcctaacaacaatggaggctggtgcaacccaccactcaagcattttgatatggcccaacccgcttgggaaaagattggtatttacagaggagggatcgtccccgtgctatttcaaagggttccatgcaaaaagcatggaggggttaggttcagtgtgaatgggagggactactttgagctagtattgatcagcaatgtggggggtgctggatccatccaatcagtgttcattaaaggctcaaaaactggatggatggcaatgtcaagaaattggggttctaattggcaatccaatgcgtatttgaatggtcaatctttgtccttcagggtcaccaccactgatggagagaccagagttttccaagatattgttccagtaagttggacattcggccaaactttctctagcccagttcagttctaagctgattacagataaaccaaccaacggctgaggcgtgcttttttattttattactggagctgcccgccacccttcttctggttttgattattcccatcaactccaagccctctatcaaggcataaattcttatcaataatacaatcaatcaccatcatatcatcataagcttgtatatcaaataaacatctttcaagtttaaattaatttatactataaattgttgtaatatcattatagttgaagttcaaaaaaaaaaaaaaaaaaaaa

SEQ ID NO: 508 - protein, 310 aa, Glycine max
MAGDSKSKILFIGGTGYIGKFIVEASAKAGHPTFLLVRESTLSNPAKSPLIDNFKGLGVNLVLGDLYDHQSLVSAIKQVDVVISTVGHLQLADQDKIISAIKEAGNVKKFYPSEFGNDVDRTHAVEPAKSAFATKAKVRRAIEAEGIPFTYVSSNFFAGYFLPNLSQPGATAAPRDRVIILGDGNPKAVFNKEEDIGTYTINSVDDPRTLNKILYIRPPANTLSFNELVTLWEGKIGKTLERIYVPEEQLLKQIEESAPPVNVILSINHSSYVKGDHTNFEIESSFGVEASALYPDVKYITVDEYLNQFV

SEQ ID NO: 509 - protein, 389 aa, Glycine max
MVSVAEIRQAQRAEGPATILAIGTANPPNRVDQSTYPDYYFRITNSDHMTELKEKFQRMCDKSMIKTRYMYLNEEILKENPNMCAYMAPSLDARQDMVVVEVPKLGKEAAVKAIKEWGQPKSKITHLIFCTTSGVDMPGADYQLTKQLGLRPYVKRYMMYQQGCFAGGTVLRLAKDLAENNKGARVLVVCSEITAVTFRGPSDTHLDSLVGQALFGDGAAAVIVGSDPIPQVEKPLYELVWTAQTIAPDSEGAIDGHLREVGLTFHLLKDVPGIVSKNIDKALFEAFNPLNISDYNSIFWIAHPGGPAILDQVEQKLGLKPEKMKATRDVLSEYGNMSSACVLFILDEMRRKSAENGHKTTGEGLEWGVLFGFGPGLTIETVVLHSVAI

SEQ ID NO: 510 - DNA, 1518 bp, Glycine max
atggcccagcgccgcagcccccaacctctcccagagccagacaccaaaggaaacgattcccaccaaaaaccgcaacacaacaaggaaacagaccgagtcgccgaatcgccttccgccgccgagtcgcagcgtggcgagttacggagctccgacgagcctcgtacggagtccaatttagaaaccctaggccgtggtgtttcctcatcggttgaaacccttgctgcgcagtctccgactgacgatttgcaagggagctctaccgcgcttaattcgggtgccaaagccgaaagtaaggagaccgttggatctcctgaaaaggaaattattgatagaggagcagtgcagccactccaaactcagacagaagatcggcttcaggtgtctgcgtgttcaactccattgtctgatctatcaccaacttctgttacacaatctttatcaattgtttctagtccaaccataccgaaacagaaaatatctactccaaaggtcaataacgcacatgtgccagaagtagataagaaaaatccttctggtcgcaaaaccttatcttctgtttctattgcaaggacatcagcatctgatggatacaactggcggaagtatggtcagaagcaagtgaagagtcctacaggttctcgaagctattacaggtgtactcattcagattgttgtgctaagaagattgaatgctgtgatgattcaggtcatgtgatagagattgtatataaaagtgagcacagtcatgatcctccacggaagactaattccattagggaaaataagtttctgtcttccagtgaacccattgtagaaaacagtgttccggagcagcctatcaaagttctgaaggatgctgatccatccatttcttcaaaagaatctctacaagaagcaccctgcagcactgataagaaacgacaaaacacatctaatatcagtggtaatggtaaagttattttgaaagaggaacatgtaaatgagccagtaccaaaaaaaagaatgaagaaaggtgacttaacagacatggattctccagtaaaacctggaaaaaaatccaagtttgttgtacatgcagccggagatgtggggatatctgctgatggttaccgatggcgcaagtatgggcagaaaatggtgaaaggaaatccacatcccaggaactactacagatgcacttctgctggatgtccggtcagaaagcacattgagaccgctgtagataattcagatgccgtcatcataacatacaagggtgtacatgaccatgacatgccagtgcccaagaaacgacatgggccaccaagtgctcctcttgtggctgctgcagcacctgcctccttgaacagtttgcaggtgaagaaatccgattccccacaaaacaagaaaatttctactcaatggtcagtggacaccgaaggagaactaactggggaagcactggagcttgggggtgagaaagcaatggagtcagctcgaacgcttctgagcataggttttgaaattaagccttgctga
